United States Patent Application Publication US 2026/0265781 A1 - sequence listing, part 3

SEQ ID NO: 22 - DNA, 26290500 bp, synthetic construct (residues 4,381,751-6,572,625 of 26,290,500)
  source 1..26290500: mol_type = other DNA; note = Hot spot 1 - Chr 3 contig ref|NW_020822499.1 from Cricetulus griseus
ccactttaactatactaaaatagaacaaaggagatagcataaacctaatccctaaattctagaagcaggaagccactatacacaggaatgaaaagaatttcctccctgttctttggatatgttaaacaggcataaaatttcaacacaggcaaaatgtgtcttctagtgtctttctacttccctactgggactctaaatctccaatcctgatggtgtgagtccaaaatgattcatttaatgaattccagctttcaacagttcttgtccttttttgagtcagcttcccagtgcagctgttcaaaacagttttgtagttctcctatacaccttttattattataaccccacctaagacaggctacattaccacttggcaaaaaagacttaccttcataactcaaacaccactgtgctatcaatcctaacttgccctgccccagcctcctcagcccaatagctagtaactcctactgagtttgattagcaggaaagcctaatggggatatttcaagatcttcaaatgtattatgttttcaaagaaagatagaacacatacaactgcaatcttaaaattgaaagaaagaaaacagaaccaggtgtgtaacagggaaggatagaagaaggtatcagaattaagtgcagcttaaacattctgccctttacaaaacctgtctatggggcccaattactgtctacaattctttgcttaacattcaaactaactatgtgctttgaggtctggaattatccttgtgatagtttaccatgactaaagagatgcccctaactataaacagctgcacttttctgaatctgaagtcaacaagaactacaagacacaatattggtaactactgcacatgaatattcctaaactcttatcaaaacagaattactactaaaagactgaaagaaaaaaagcagcatctaagcaatctaacaaggcacggaaaatcctctagataaaaattcaaatgcccaccggacagtggtggcacacatcattaatcgaagcactggggaagcagaggcagatggatctctgttgagtttgaagcctacctggtctacagagtgagttccaggacaatcaaggcaacatagagaggccctgtctcaacacctgccacccagcagaagagagaatatttgtgctatatttgataaagtctacaaaaaatggtaattgttacttggtatttaacattacatagaattctcctgctgtataaatcacaggtataagacaaaaaggcatatagaaaaataattataatttatgtactttttaaaattaaaaaatgctcagtattaggggaaaataagaatggtcttcttgaaagacaaaactgtttaatggtttttttcccctttctctttttcatatctctactccaaaagtcaaaagaaaacaaaggtttaaagacaggcctacaagttctaataatccctaaaatcctgcaccagatagttaaacaatgctgggtaacttatttaggttatacatagagagtattcaaatagctgtctcagtcaattgaccaataagcacagagaaacacaggtctgtccaccctggagtctgtctccatagacgccatcattaacactaaccccagtgctgccatggattacatttcaaattatcacatgattataggttcaaggatgggctaggcgccaagtcttttaaagcagatcaagtaacatgaatctgccagcactgttgtacctcatcaccacactttctagatccaacaaccttctctatcggacttcaaatatttgcggaatccagctctattaaaatatagtttgaactccaacagggaaataacttttacttaggtatttaaacatatatacaaataagaaaacatacttacagattgtatatcttgtaatggtttttatgctttgaatccaaaaaccttaaaacgaaacaaacaaacaaaaggccaccattaacaaaaatgagctaacatttcaaattacaacaatattgagcaggactaaaacaggtgttattttccctaatctcaaatactattaataacccaaatgtatatcccctccaacttcacaccattcattaatattacattacacagatgcatacaatctgaagtaaaaccatcttttatcaaaaactattttcatatcttctgtcttcagcctaataaatcacaataatgtcttgaaaaggcaatattagcaattcccaagtgcacctagctcatactgatttccacaaaaagcataagcaataatgtactctttaaaaaagcttaaaatttaatcatgagacagggtttctctgtgtaactttggagtctgcctggaactgcctctgtagaccaggctggcctcacactcacaaagatctgatagcctctgcctcctgcatactggggttaaaggcatgcaccaccatggcctgacaaatttagtcttcttaatgggaaaaaaaagtacaagtagcaagtaatcttgtacaaagtttagcaagcatttttcacatgtgtattctctcttatccctcataaacatggcaggggtggaacttacattttacagagaagggaagtaggtcttaaagagattaggagacttgcctaaagtatgcagggaaagattcaaacccaaggaccactccctcaagtcagcggtgaaactaaacaataattacaggtaccaaagcacttattacatgccaggtattattctaagcactttataggtataaatttgtttaatcttcaagactgtaacagaaggctcagcaaagtagaacactgaagaattatgagacaaaaggaagacagtttcatatagcctaagctagtcctgaatttgctacatggtggtagataaacctgaacttctgaccctcctccctccatcactgggattacaggtgtgtgtcaccaagcacggtttatgcagtgttggggattaaacctagagcctcatccatgttagaaaagcattctaccagttaactacatctccaggcccaactggagtttttcaagatgaagggataaatagccaataaaactgactttagaaaaaaaggctccaccatcccacgtgaagggatacactctggccctggacacatggggaagggcccaggaccagcataggaagacttggtggactttgcagagcccccgttgagggccctaccctgcctggggagtggtgggtggatggggtggggggggggctgggggtggggaggaggttgggggtgaggggagggagaaggagaagggacttgaaataagcttgttccctaactagaactaataaaataaaaagaaaaagaaaaaagaaaaaaaggctccaatagaaacacacatatcttatttctaaatggcaaacatatcacaagaccctaaagtctactagaaaagatatagatggcataaaaacaaaaagatatcaaagacactgccattaacaacactagcttctaaaactaactatacaaagtctgatcttcaggaaaaattacttgcagcctagaatgctataccaagacagactataaatcacagggagcagataatacaagcattggttaagcaacaagttattttgttttccatacactattctcaggaagttgtaaaagatcctgagagtagaaaatcatgagaggagataataggttccaggaactgggcaacccgacttgaaaaagaaatgagaatcccaaggatgggtaaaagggcatttcaggcaggctacacacacaggacggcaattagttccaagtcaggcagatcaggtgactccaggaaagggagagactgatgagcaccaaacgagctcaaccacagtagtgggcggtggtggcacacgcctttaatccgagaactctgaaggcagaccagagttccatgacagccagggtcacaaaaagaaaccctgtctcagggaagaaaagaaaagaaaacaaaacaaaacaaaacaaaaagtgctcaaccaccaaccacagtgagatttatagaactgagggacaggtttgtaataaattaaaatcaagaacatagatctgttgcagttatattagtttccagttttgtgtttttatgggatttctgtgtgtgcaaatgtgtgtgcctgtgtctgtgtttcctttgctttttctttggctctttttcatttttgttttgtcctattccctttttttttttttttttttggtcctattctggtttgcttgcttttgtcttatatttactctttttttaaatgtctctgttttctaaagagagagagaagggtgtgaatttggaagagaggaggtgggagagggaaactagaagttggggaaggggaaccaaaatcagaatatattgtatgaaaaaaacttttccaatttagaaagaggaaaattaaacagtatgacacaacatacttgcatcctaatcaggtaacagaagtggaatacaatatatctttggaatgcaatataaaactagaagaaaattacagcaaaatattaggaactttataccttttaactacagcattttctcttttaaaaaaaatattggaatgcttggtcagttctcttttacaaataattttttaaaggaaactacaactctggaaatatcaggaaatggagaaagtgttcgtgtaattttagagttcatgtcagactaggaaggaaatactggcatagtaagatacgataccgatctgtaaaacatttcaaatgcttcatttcatcaacagcctgtgaatctacaaatctaaaagactataggcagaatttaactataagtcaatacactattctaatttaaaaagaaaaaagaaaaatgccattaaaaaaacacaaaaacatgaagacatactttgatggctgaaaaacaaaacccactgagtgacacagttgtaaacccaacacagagaaggcagccaagtcttataatgggtgtaaagtcaggcaggattacagtgagacactgtctcaaaaaaagcaacggcaatcgtaacaacaatgctatggatttggtaagactctctaggattttcttttgcaataaattcttcaagaacaaaaacaacaacaaaaaatttaacagcctgggaggcggtggtgcacgcctttgatcccagcactcaggaggcagagagaggtctaggacaaccagggctacacacagagaccctgtaacatatactttaataaagcagaattagcgatcggtaattctgaacaaaagatagcccatcaatttctgtaatcaatgtttatctgaatctagtagcatagaagggaagggaattataaagctgtctacataaggaatcaaagtagtttccttactttttagagttaataaaaatcattaaggggaaaaacaatataaagataaataaaagttgaaaagaaagtcaacacacatataaacaccagtgtgcacaccatgcccagctagatttggtaacttattaacaacagaacttagctgtccacagctctgaagctggaaagttcaagagtgtacacacacacacacacacacacacacacacacacacacacacacacaagaaaactgagaaaataaataatattaacaaaaacaaagctttttatgtgtaaacaccgttccaaaggtctgaagggggggataaaatataagagctctgcagggaagctgtgccatctttatgctcaccagttagcaaacactaaaggagaccagaagcaggtgcttcgtttctatctttccctctgtgttagacactgaatcctacagagctagaagcaaggcacaagaaaacagattcttcaaagatctcaatggaagagctgacaattccctggcagtcaccaggatgttggcatggcagcaggagcatgtatttcaagagtctaacagcaatatcctaagagactgcagcccctacaacctcctagacatgccttgtttcctaaacttctgctttccaagacataaaacttcctaagcagcattatgcctttctgattaaattaaagacactttctgtcctttgcaaccaagaactcataattatttttaaagaatattttctatggtgtgtcccctttaacagttgaacatttaggtttcttagctagcacgtgagccacagaaaactaacagaagaaagaagcctttaaagtatacagtacagcatttgaaagaggtgtgtgtgttgggttgtggggattgggggggggggctcaaagaacttgattacttagggaaacattctccacttccttcactgtcctctgaggagtttcatgaccacatttggctcagcttttaagtctgacacaagagaaaggaaaggggggaaaaggcaagaaaacagtactttccaaaaagaagtgggaaaacttgcctacagttatttagaaggcagaggctaaattattagacaaaagcagagagggaatactcctgaaagctgcacaatctaaaatagctctctcctaagtcataactatacctcacttgaagcaattctgacatgcatatccccttccactactctctcttacccctgctgaaccccttcttcccaactttgatgtcggctgtgcagttgtgggcacaggcctttaacctcagcactcgggaggcaaaagcaggtagatttctgtgagtttgaggtcagcctgatttacaaagtgagttccaggacagccaaagctacagagagagaaacactgtcttgaagaaaacaaaacaaaacaaaacaaaacaaaacaaaaagagccaactttgatgactgtgtatgtgtgtcactgagtttaactgaggttgcttacccaagcatgaaagatttcttatgaaataagtctagataagtcacaagagtgaatttttaagttacttttaacataatacatatttcaaatactagaaaagtgttgccaagaaaaaaaaaaaaaaagaccaaacaagaaacacaaaaacctattttaaaaaaaaaaaaagaggtcagaaaagacagcaccagaaatcaatgttcacctaccaactgcacttgcagaaccttttccacttttccacgagcccactcagtctttggagtgtctaggctacggctgacagtttccatgagctaactttgggggggggggggagagagagagagagagagagagagagagagagagagagagagagtgtgtgtgtgtgtgtgtgtgtgtgtgtgtgtgtgtgtgttcacctgtgtgttggatatacacgtggcacagggaggccaggagcagaagactggtattgctctatgattctgcaacttgttttctctttgaaacagggtctcactaaacatggagttcattattttggtcagcaagcccccaggatccagtcctcttcgtctcccttcccatgattggtgttacagaaacatagcatgccacctggttctagagctctgaactcatcctcatgcttacatagcaagcacctgaccaactgagccatttccacaaccctgattttaactcttatacagaggggtctactcatccaagtctatatataatacacagtcactgacacctttacagaggcctgcaaccaacttacagaagccacagttagtgattaaggccatgtgtttcaatattagcaatctgtgctcttgtcattaatttctgcttctgagagaagcagagaggatgtgtagacatgtgtagacagagaggaagctgatctaactaaccatgcttgcaagccccaccaaccttagacttcagggatttaagccttcttttgcaccaccaccctccctttcctactttaaaacaccaagcatttaagagtagcaacaattgagagtaattacacagacaagaaaatttaggaagtcatcccccatgcccagaaaaaaaaaaaaaaaccttaagtatatagcataagcagatacccatcacagaaatgtccaccagaaagaaaagctgggcaaactctagaagctgggagtatttccagagcttctactccagaagagccgaattcccgttttaagccaccaggcccctcacacacacacaatttacaagactcagacaaaagcacatgaacacatatgcatacacacatcccaaaataggaagtgtgtatcacacaaaggtagaaaaaaaataagtcaaaaaattgtcttccaggtacaaactcccagagacagcatgtacaagacctgcacacattcaaacaacaaaatctcaggtgaagaggacacaaagtcctgcccctaaccaagaaattatttgcagttgataccgactggaaaacagaatcggttttctccaaaagcgagtcattgggcatatgaaccacattccaggtcagcccccatgcccaagagcaggtggccagcacaaaacagactccatgtattttgtgctctcctttgtctttttggttttttgtttctcatttttgttttacaaaacagggttgtttgtatacctctcagtcaaggaactcacagagatccacctgcctctgcctcctgagtgctgggattaaaagtgtgagccaccaccacctggtgtttgttatgattttcatttttttttctttttgaaaaggacagagaaaaagaatatgaagttgggtggatagagaggtgggaaagatctggaagttggagaatataaccaaaatatatgaaaaatgttaacaaaaaatttaaaagaatataatcctagccatcgctgaaaaatacagtaaatagaataaaaatgtattagaaggaatcaaaagtagatctgagcacagatgttataagagtaacaactttttggttagatttaagatctgtgccataagatggaatccatatctaacactgtcaaaatgaggccaagagcctgtggctagataggtcatggaccttagaggaaagcctactactattactctgctaagtggacacagcaatagaatgattcctaatgacttattgctataccaatacatcagtataccaactcaaccctcattagagatgttatttccagatggcaattaacacaaagacccacaactggtccaaccctaatagtattttgtatcccaccctccccctcaagactcagggatctatgcagaagaggagcagaaagactgtaagagccagaggtgatgtgtgacttcaaggaaacagtgttttccaggcacaatagggcagatgcacactacagatgctcacagcaactgtgacagcataacagacctgtgaaagcacaagccaaagtcccacccttagctgaggagcaaaggcattttctttaaccacactccagggcaggcaccacatgaagtagttgtccaacactaacttgatctgacttggggagagtgggggagaatgcaacacaaagttatagaggtagcgatgttggaaaagatctgagagatctgggataaagataatcaatactgaaagcaacttcctgaggaaaagtagagagattaaccaacctgtgagtgggctaccttatttaccttggggattccaggaagagaattatttgtagaagtaataagcaaaagcttctcaaatctgatgaaagatataaagaactgtggctcaatgaacctcaagtcacaaagatgcagacttactagacagatcacaatcaaaccatggaaagataaagacaagctggggatctatttcatttgataagagctctgagatcatccccagtttttcataacccttgtagggtgatgctcccctgcaatcccagcactagccagggggaagcaggaggaccagaagttcaagtacatccttgcacatgttagagagctacaagccagctttgtgctatgtgagacactgtcttggtcgatctctgtgagttcgagccagtccggactacttagcatgttcgagaacatcctccaaagctacaaagaaaccctgtcttgaaaaaccggaaggaaggaaggaaggaaggaaggaaggaaggaaggaaggaaggaaggaaggaaggaaggaaggaaggaaagaaacctgcagtttcaatgcagaatgagagaagaaactagtcacaagcaacagtctcggtatcagcagattttttttcccctcagaaattttgaggaactggaagcaaggacacaacaatatttaaagtcctagaagataaaaatatcaaccaaaaatatccagcaaaactgtccttcaaaaatgaggaatataaaaaaaattactgagatattcccagagaaaccaaagttaagaaaacttattaccaccagactagcccttcaaagaaatggtgtccttcaagtgggaatgagagaacagaggacaactgcactacatcctcctctcacagtggttgcctacaactgtggacatcgacaaactacacacacacacacacacacacacacacacacacacacacacacacacacacacacacacacactcttcttccaatacatttatctatgacagcttaataatctaggcacagtaaaacattaacaggaatattttaacacaattttaatactattatagtgaaagttatataaatatgctacttctctcaaaagaggaaaggcaaatagtatttttgaaccactattgaccacacctaagctgaaacctcagataaaagaaactacagcaacttgaagctacaggatgaaataaagaactcaagaaatgataattaactataacaacaaacatcaaatctatcaatactataacttcagcttgtaattccactttttctacatgattttagatggtatttttaaaaatccaattattttaaattatggatatgtgacattaaaaagatacaattttatatttttttaaacgctaacaggaagcaaggatggaactgtacaggaaccaaggcctaaatactaatgaaggtaaaatggtattgtaactttagaatgttaaatgtaatccctatggcaaccacaaggaaaatagctccagaataaaaaacaccaaatacatttcattataaaacaactgagcacaaaaggcagtcaggcaaaccagaaacaaacaaattgtagaacactaactctccctgtatcagtaagtgtgaacaagttaaaccctccaatcaaaagaccgagactggcagaaagcatacaaaaaacatggtccaacaacacattcacagaacacataggcacagatttttaaattcacaggcaggaacacattggaaaagggcaaaaataattctatgtaatgaaagagtgaggtcagtattagaaaatacactagatttaaagtgtgacataaaaataaacaaagtattaatacagcaagaagattctaataattgtaaacatttggacacccaaatacctaaagcagctgggcacagaaacatacctccataatcccagcacttgagagacagaggcaggagcatctaatgttcaaggtaggcctagactacataataccctgtcttaacaaaaacaaacacaaatacataaagcaaaatttaacaaaatgaaaataagaaatagttctaaaatagtaattgcattctttgatatacacaacacttcaacacaatagtagacaagcaaggaaaagtgacacttgatgagcacagtaaagcctaccagcatttcactgtactccctcacacaccctgctcagcaacagaagacaccatgttcagatacactgtatgttcagacacaaatgaactccagcagtttttcttaactgggcatcaaatcaaagaataaatataaatgaacaaacatcaaataaggtatattcttctacataacaggatattagaaacaagtagaggggggagggagctaggagaatgagatggggagaagaggaggggtgaggaggacacaagggagcagaaaggttgagggggggggagaatagaagaaaacaagaaaggagataccatgatagaggagacattttaggtttacagagaaaccaggcactagggaaaggtctggagatctacacagatgacaccaattaacaatctaaacaacagaggagaggctaccttaaatgccctcccctgataatgagattgatgactgtcttatatgccttcctataaccagctggtgaaagtagaagcagacacccacaactaatcactgaactgaactggaatccagttgcagagaagaacaagtgatgggcaaaggggtccagaccaggctggtgaaacccacagaaacagctgacctgaacaacggggagctcttggtcctcagactgatagctgggataccagcatgggcctgatccacaccccaggaacgtgggtttcagtgaagaggcctcagaaatctacgggacctcctgtagaagttcagtatttatccctaacatatgtgtggactttgggagcccaatccacatagagggatactccctgagccaagacacagtgggtctaggccctatcccaaaggatgataaactctgatgaccacccccccccatggaaggcctcaccatccccggggagcagaacggatatgtgacaggtagggtattagttggaggggggggtgtaggggaggagaagagggagtggaaactgggattaacatgaaataaaacaatcttgtttctaattcaaataaaaaaaaacattaaaaaaaaaagaaacaagtagaagccaggcagtagtgttgcacatctttaatcctagctctcgggaggcagaggcaggtggatctctgtgagtttgaggccagcctggtctacaagagctagttccaggacagccagggctacacagaggaaaccctgtcttgagaaaaaaaacaaagaaaccagtagaaaaagagaaagtaaaatttccaaacattggcttgttctttgtggctcctgataactggagatcagaacttatgctgatcctctggtatgttttagaaaaatgataagagaacacaagttcttttttttttttttaattttatgtacatgagtggtttgactgtttgtacacatgtagagcacatgagtgtctgatgccctctgggcatcggatcccctggagctggaattacaagcagttctgggccaccatgtggtgcaaggaaccaaacccaggtcctttgcaagaacagcctgtactcaacctctgtgccatctctccagccccttacagtaccttttttttttttttttacacacagttacagtctttaatcccttgtgatcagtctgctagcagaagaaaaatggcaacttaacaacaatgtgtttagtgacaaaggtcaagcattacacaaccctatctgatctctcacatgggaatgagagttcagttttgacagttctatcagctttttaaaataagctagcaatgcaggtttcagcatgaggcttcctgatttttaaatatagtccagatttgtccgaaggtttccagattttgtcctctgatacacaggaaaacagatattaaggaaagtagctctgagctctgcacagtggtggagcacctagtgatgacttgaaatgcaacctccagaactgccccacatcaataaaaaaggaaaacttttgctcggcagattatcacatgattatacacccagcactaaggattcggaatcaggaggatctcgaactcaagactggccttagctacatgagaccctgtctcaaatacaataacaatcaataaagaaagaaaaatcacagacatggactcaaagttcagcctcttgctacttccaagatgtggcagttgagatttaaatcacttatgaaagtgaaacagggattagattcactctaaaacttaataagatggtatatgcaagctagtaatacaatagttaacacaaataaatagtaaataatgtacagaaaacagtgtccattggggctagagagatggctcagaggttaagaacactggttattcttccagagggtctgagttcaattcccagcaaccacacagtggctcacggccatctgtaatgagatcttgtgccttcttctagcatgcaggcatacatgcagacagaatactatatacataataaatagatctttaaaaaaaacagtatccactacttaaatagcaaagctagatctgtgcccataatatttttactgtttaatacactaaatctccctatgagcaaagacatacagcctgcaaaagtagaggcagccaatggaaatagagctttcttcaggaatgacaaaaatgttctggactttggtgtatgtggtgactgcatcacctctagctatattgtgaaaatattaaatgtcactcaaattatacagttcaaaaacaatgattgattgttatatgaactcactttaagtgggaaagaggcgggcaaagtgagggaaggaacaagaaatgttagcatggaagaacagaagtaatatattctttcctcttcatcattgttaagttggccatatctgttttcaagtcttatttttaattgacagtcaataatgatattaggataacaaatactttttacttattaaaatcaccatacattaagtttgattgaggaatgtacatataattaagaatcgaacacttgcaaagtttcttcagagagaaaatgtatatgctagcagccaagaaagaacagactcttgaatctgcaacaggttacacatgggtaaggaagccaagtacacaagacagtaacagatagtcttttgctaactcattatgtcacaagacagagctctgtttccttattaaaaaccatgggtggggctggaaagatagctcagaggttaagagcaccaccgactgctcttccagaggtcctgagttcaattcacagcaatcacatggtggctcacaaccatcccttatgagatctggtgctctcttctggtgtgcagatatacatggaagcagaatgttgtatacataataaataaataaaatatttttaaaaaatgggtaaactgggcttggtggacaagctggtaatgccagcacccataggtggaagcataagggtcctgagttcaaaaccagcctggactaagtataagtgagccagggtcattatagcatgaccctatctcaaaacagaaaaataacaaaaatgctcttaccataaactttacaacaaagtgtcacagattcagaaaaggagaaaaaatcttagacacacagcattttcattttcattttcaacatttcccaaattaagctccatcaaacactgtctaggaatgtgagggttaacaaatcataaaagaaaaccaagaaagcatggaggaaacataaaaggtgcacatggtggccttgtaaagaatctgtgtagaaggcagtttgcctctgttacatctacattctcctgattcattgggggcagaacagttaacagttcacagttcacaaagatactatgcaccagtctgttaaagactgcttaggtttagaaacagggcactttcttcttagcctaagggacaatgtaaatgcataaatcaaagacaaatgaactatcagaacaaagactggtttcccattacccttaatgcagggtaagaccttagtgcaagaaataggagaggaaagaaagaaaaaaactattatggaggtgctctttatttccctcccttcagttgtcctgaagtgtccatcaatgcttattcctcaaattaagcaaatcatttgcaattaagaaagcaaacaaagctccagccagggagtgttggcacacgcctttggtcctagcactggggaggcagaggcaagcccatctctgagttcaaggccagcttgatatacagaatgagttcaaagacaaccaaggctacacagagaaaccctgtcttgggaaacagagaaagagaacaaacaactaggttcatttctccattttcattgattgttcatattaatccctgatctcaaatggagaggttaaatatttgccacaaattctcaaatgaaaaatttctcattacaagaacactacatatcccaaaccttatctcatcacaggacaatttaagtttaaggatatctgcaatttaagtttgcttcactccaggtaaagatatagtacaataacaaaaatgagttttatacagtatttcttgtttgggggaaatcataagaaaaatatggaattagataaaagaaaaatactttaaaatatcctttggacaccccactacacaaagtgaagaaagtttagctgacaagaattttcagctatctgaagagtcctctagtccctgcttcctgtccgctaccatgaagagtcactgccacacacttcttccaccatgaacttctgctgcaagttcatgatggcacggatggaagaatggagtgcctcttccctgccttctcaaccatgacagactgaaatccctctgaagccacgagacacacgaaacctctcttccattacctgttcctgccaggttacttggtaacgatgccaatagtaactaacataaaaggtattggaaaatgaaaatatttctgagatgttaccaacttcaaagcaaaagaaattgctattgattattcctaatgtcaacaatatagcataaacaaactaaagtaaccagttatttagacgttggacacagatacctttggaaaagtcaatcctaaaggtttatttgccagagctgacatggtggcacacgtttttaatcccagcactcagaggcagagaaaggtggatgcctgtaagttcaagaccagattggtctacatagggacttccaggctagccaaggctacttaggtgagaccctattttcaaagaacccacacacaaaaaatatttgtagtcattttagtgtgtaggaaaaaatatgttatcttctcatctagtcattcactattcatcctttactacaatagagggcgtcagactggtaaacagaagctattcatgtcttactgatcatttatcttaaaaaacaacaacaaaaatccaccaaggagcatagattcatatacagctaattctccatgctgctatgctaaaaacattacatacagtaagaactagctaaataatccagataagaaatgtttttaagaaaaacatccgacaaagcccaaaaggctaaataaaactagatagataaagctagtcagaattaacttcagtctcggtcactaattacaaaatgaacatgcaaatctcttaatttgcaaacacagcataggaattatgaaaccaggagattcagaaccaaactaacttcccaacacaacatattcttggctgagttattatagtataaggtctagtaactggtggtaaaagtctagaaactggaacttgccagtaacaagaaagatgatcaatcactctcactgactaattcatacttaacagaaaccaatataaaattagcatgccagattagtcagaagaaccttagaaggccagaaaattgtccctccactcaaagtactcggacccttttctgatccagcttaagtactaatttggcttagttgaatacaaaattgatgtgaaatagctcatcttacaaggcattacacgcagggcggaaacaattctgcatcacagcagaaaatacattatctggtgacccacatctagacagactactcattcaccatattattctgcgactcacaattcaaaatcccctcccttactcttttttctatggcctatttcattctgcagcgcctatgaacctgccatgcaaattaccttctgttgtgtgatattttgattgcattctgacactccctagactgacaaaggttgttttgaatcagagggcggagttagctaccaattaaccaaaattaaccatagaggtttcagagaactaaggccagatagagagacacaggaagtagaagggtggggctgaaagaggatctcagcctctttgaatggaagaatgggcggggtggccaattctcggccacttgtctgaacattcaggttcttaccctgatatctgacttccaagtttttattgttaaagaataagataaacacttcacctgtctactatgttctactgaattatgagaaggcaaatgcatttccctacttttaaaaagtttttaaacagtacctctgacagtaagtaaaacaaagtttaatggaaactacatagttgtacaagggtttgggagtttgttttggtaattttatagatagtgaaacttaagcctgaacaaaacataagtagtattataataagtatctaaatgaacacatcttaatacactaacaattaaccacttgggaaaactgataactaacacatataaagtcatgtattcatatactattacaaaagcattctacagctgcattaatactttgtaagttacaaagtgctttctcacctatttaaatccacatgatcacaaagtaattaaaagtccccaagacataagtacaaaggaaatagtctagaattttaacttttaactccattaagtacttcataaccagcatagcaaacatagcaagccccaatattaatggattaaagtaccattatagtttgttctaaaaatttaatggtcatttacatatatttttattctgaaattataaaatattattaagactaattacccaacaggtcataaagtatttttaactggaccttgacaaacacttttctgaattaaatgacaattacacttggaaaattatgtaaattataaaactcttaatttagtctttcctatgtccaacaattcccttctttaatcactgtatcaaacactaacacatgtgtaagttccctataaatatacatgacagatcagtcacctacacctagtgtgaataactaaataaacctactcaaggcttcacccaaatgtaagataaaaaacttatactgtaatagaaatcaggcactaacttggtaagaagcatcttatcaaatacaaaaaaattatatcataaaaatacatgattacatatgaagtcagttcttatacagtgaattgcatcctactgagagctagcagatgctttaggttaaaaaactttcagagtactatcataatgaaacaaagtctacatcgtaatttacataccattctgtgttttaggaatcttttctaaataaaacacatgaatatagtttattaatatatgaaatagaaaaatcaaagagttcttaccttactacatcatcaatattgttcctgtatacaccttcaagtctttctgcaggaaatcccatagcaataatatttggataaatatctgagtatttaagttaaggaaatacctaaaatatgcaactgtacatatatgcatgcatttttaaaacattagcttcccccactataatcataaaaggctgtcaaatgcatgtctgcaacctactatgaatagttaagaaatactgataaacacattactctaaaagacactttcaaacaattttataacaaaatactgttaaaaattctctagtaccttgaagaaaaaaaaaaaagacctaaagctgggcattatacaaaagcctataatcccaggactcaaaaagctttcaaactggagactatcctttgacatggaacaaatttgagaagagcctagattatagcaacaaactgtggaaagcatacaaaattaaacagtaagtaagtagtcggaaggcctttaatcccagcatcctcaagctaaagacaggcagatctctgagttcgaggtcagtctgctctacagagtgagttctagcacagctagggttacacagagaaaccctgtctagagaaaccaaaaaaaaaaaaaaaaaaaaaaaaaggaaattaagcctaagacaaaaggccatttccatatttacactgttgaggaaaatataacctctatactttgtaaatccaacagctggcatgtcatggtaaactcaaaaacaaaaacctgaattggcctgacttagcagtacaaattctaatgtttcctggttagcaatgattagaacaataagaaagaagtaaatagagagagaatgaggaagatagtgagctggctgtccctgaagctgtacaacctggacaagtgacttactatccttacactgttctacccaatgactgagctggaagagataacctcaaagccctctagtccctgccagttgtgaggtcataatactcaatggaggttcaagtctggttactttctttaatcaatgtaatcagtacttagcatgtcctttagcttcaactctgttatgcaacagttaacataaaagcaaacctctatactcacaaagaatttatttgcaattaactaaaaatctgcatctcaatgaaccttgctcatctttccagctctcatttacatcctcatcattacctatcagacttttcacatcaactacagcaagctgtctgctttaaaacagtcactaaagatgtctggctacatagtctggatctatttgcttcccacatgtaactcagcaatcaaactccccagccactgagaaagctgtagccatgtatctttaaccccaactcacaaagcctttgggtaaaaatgttaacttacaggaataatatagatggctaaatgacatcatgcaagagtaaatgagacaaattaaaaattctgtaggacatgacctaacatcttcagcaagtcaaattacagccttaaggttcctaatttcttaagtgcttttataaacatatatactttaataacattttctgtgccagggacaaattttgtcactgtaagaacacataatctcactccaaccaaaaaagaattaaaaaactctaaaataaaatgagcatcatttaaatatcacaaatacggcctgtcatctattattctaaattaggaaaagggtcacacctaaaaatatagatctcttctttaattgctaaaatgtgctggttatattatgttcagtaatgaaggagaaaagcaaacaaggaaaggtttaaccagacaaaagcaatacaacttttgagacgttttatataagattaaattttttgagaaaaattgaagaaaaatggaaaacacaagcaaaagactaagttaccaaaatagaggcccaagacagtgatatttactcccgaaattcccacccaaaacattataaattagtttggtcaaaatataaactgagaagttggaagagatagctcattgatagagggttatgcctggcatgtacaacacacacaaaggaaaaaacatactgtatgcacacacttaataatctgttttactgaacaatgcaactaagaaccgaattttattaaaagaaaaagatacaattattgccattttcagtgaatgttaatatgacctttttctcagaaaagcatagaaaaaggtctcttgaaatgtggtcattctatctagaactaccttcaaattcagctttgtgctctgaatactaatgaactgaacaagttggcaagttttttattgttggtgggaactctggtgttctacctacgggcactatccccagcttagttaccttcctaaagaaaaccatttgtcagtaactacagataaatggatgacacttacttactaaactcagctggcccctccattcctgaagtgatccatgtactgaaccttctatgccaatataaggctaagtcaagactactgccctcatggagctcctgttttttcaagaaagacaggcacacagacacagtagtacttaaagtattattattacatttttaaaaattaagatgttttcaaggggaggagttcattctttggaataaactgagtcatctcttcagcccttgtgttttcttttgtcactactgtaggataaagctcgggagctgaagagatgactcagcagttaacacactggatgctcttgcagaaagaggatccaggttcgattcccagcacacatattagcagatcacaaccatctgtgtaactccagttccaagagatcctaatgtccttttctggcctctgtggataccaggcatgcatgtggtgaacagacatgaatgcaggcataacacttgcacatacacaaaaataaaatttatattaaaaaagaaatactgctagaagggtccaagcagagaacacagaagcgaaatagaaacccagctcataaagacacagaaaaagataggatttacataaagcatacacagggttaagaatgccatggcaagcagctcaatttaatagggcatatatacatagttggagtcagagccaagaacaagtgcagagacaatcttgatcatggcctgtccaatcagcagacaagacctacttgcatttaccacatctgtcttctcttgctatctgccagtgctttcaagcaatggcggttaaagtttgcatgttacacatcacaaagaaaatactgaaattaaaaaaaaaaaaaataagagggccgggcggtggtggtgcacgcctttaatcccagcactcgggaggcagaggcaggcagatctctgtgagtttgagaccagcctggtctacaagagctagttccaggacagcctccaaacccacagagaaaccctgtcgggaggggagggagagtgggaatgggggggtaggaggatgggaggggggatactccaaagccacagaaaaaccctttctcaactccccccaaaaaagagggaactaaaggggctttaagaacaagaatatagggttgttgtgtaaatgtttactagctttaagccctgttctaaccatggaatgactattaatgactatttccatgtgatacagaacaccaaggtcacacgtccaattctacaacataaagctgccaactgcaggtaaatccatgtctgggcttcataatctagttttgttctcacgtcaactaacagtacttcttcattaacttctttgctagttgattcaaatgagatatctgaaaatatccttgaacttataaaacggcaacaggctctatagttgtaaccaagaggttattattatcatagttcttcttgtccactgtggtggccacaaacctaaaattcagcacttgagaagcagtcaggaggctcacaaagctccagaccaacctggtctacatagcaagttccaggtcagccagttagaagtataaaaccttgtctcaacttaaacaaaacaaaaaagacaaaaactacaaataattgtattcaggcatcacggcacatgcctctgaagcctgcaatcccagcacctgggaagcttgagatcagagggttgcaaattcaaggccaacctgggtatacagaccctgcaggtaaacattgctagtagtttttctgcttaataaaactttatttatatagtatagtataatataaaataaaaaatactatatatttatacagtactataaattggtgcactcaacaaggaatctctaagatacaactataaaacacgtatattttcattctgctctagcaatatagttgaggaaaatatatggcacaaggaagcatagtctgcaaagactcagagaagtgccattcataagagaaaatggaaataactacaacaaagtacagaagcaaaccatggcatttagcatagctggtagaaacagcaattataaacaactttaaaaataataggccaggcacagtgattcacacctggaatcctatcaccaggagacaaaggcagacagacctgagtttcaaggccagccttgtctatgcagaattcttggccagccagagctacatagaatgtgtcttcaaagaaaatcacaaataaaaagtatctcttaataagataaaaattccatttgtgaaaaaagcacaatgtaaacaatgataataactatacaatgacaacatatataataatgtgaacatagacagtaactaacatactttctagtgacaaactttccttttgtggaaggaaggtttcttacttagcctgtgctaagtctgcagcttgcccttttgttttgttctgttcgtgagacagggtttctctgtatggccaggctggccacaaactcaggagactcacctgcctctgctttccaagtgccgagattaaaggcctgcacagccactgcccagcaaattcctcttgatcctctgcctcttcccctaaatttggaattacaggtaccacacaccagtgccagtgacaacttttgagacagaagcagcctggcatgctttctaatgccagcttttggtagatctgaaaaaggaagatcacaagtcctaggccctctgagctacctatcagtgtaagactagtctggttaacttaaggaaaaccaaaatggaaaagaaaaaaaaaaaaaccttaaggaaaacctgactcaaaagaaagggatggttacttagctcaatggtagaaccctttgccttgtatatgaagtccactgaattccttcaagtttaagaatacttctgaaagcaattcagatcctatgtgcacatagattaagaataaactcaatgaaaaaaactttcaattattaatgaataaagtattctgaactttaactttggcttatccagtcccttttactgtcagcaattctggaatccaaagtaaggtttagtgggtgtgtttaccagggacttaatagccctctctattattctacccagtttttcttcagagaattatgaaatgatgtacctacactgctcaagtctacatatgtgagcctctaaagctttacattgcccaactgcctggttctaatgagtttataaaacaattaccttcttcctaggactctgaaagaacatgaagaccggtttccagtttcagaacactagggcagttaaaatacacacaagtgcacatacatgtacacacacccctgcactctgctgtcactttgattctcttgccactaaaaaaccatctatgattggccactaatgaatgacaaatcaagcagaaatacagaaacaacttacctaatagctttcaaaagcttgtaagcccaacacatattaggcatccttgttaacagcctcacgagaaccaagccaaacacaaactccaaattttctacagcaaaatcataatggcacatacaaaagttttttaaagctgtaactgacccaacataaaagttcataaggaatatctctaactctctaatctttatgtttgatgtcagatttctaagttactcctataatacactgcttaaaaaaaaacaaaaacaaaaacaaaaacaaaacccactaggttttagatacttaataatcatgcaaaaggcattattcaggtctctaacttacatcaggaaagacattccaacaggtaagatgtaaagatgtgccaaaggatataccagtaatttgagaacaaattatttgagaagtcattttacttggtgccaattcacttagtagtaactgcattttgaaaagacaaaacgttgcaaagcatccacctgcactgatgttgcaggttcaacaacaagcttagagactcaaaagcccaccccacagctcccagtacaaacgtatccccagcagtggatcttctctactaattcagccaaagtggcaaaatctttacatttgcttttaacaatcaaaatttgccctttaaagtctgtgaaactacttaaaacagaaaaactgcaaatgtgtagactagattagtttacatatagctttaatgtaatacatgaaataaatcagggttctttaccctatacttccagcctagatatcatctagaaatgacttttcttttccaagtgatagaaataaatttgcctcaatggcttgttttaaagtgaagaaaaataacatgaaccggaagtaatgtgtgagttttaaatcatgaagacatataaactgtcactcataactacagtaaagagactcatattaatgatatctaggctttttataattgccttgctttaatattgtgaaaggattcctattcccactgagagcattttaaccattataatcaactttacagctgagttacaagttatttgccaaactctgaaattatagacaaaaatgctagtcaaaattcattttaggatatgaaattttctgacattttaactgtattgacagattgaaagtaagaacaagtctttgatgcatgtttaaataataaacaaaggccttatttttttagtaatttactggaggggtacaatttgtttttaagaaaataattactgccactgtgaaagaaagcacttttgtagttagtgatctttatattcaaagactatatttttaaaatgtagaaaggggctggagagatggctcagcagttaagagcactgactgatcttccagaggtcctgagttcaattcccagcaaccacacggtggctcacaaccaccttgaatgagatctggtaccctctgctggcatgcaggcagaagattgtatacataataaataaataaaatctttaaaaaataaaaatgtagaaaataggtaagctaaagttttgaagaaaaaaaactgaagtcaaccttttcaactgatacagtttggcttaggtataatgggaccctctttaactccaggaggtagaggcaggaggaatttcagggcaactaggactacagagggaggccttaacagaaaggaggagacgggaagatagaaagttcagtactgagtatgacaaaaataccagttaaatggaaggaatataaatgaaaataataagacaggaactctttaagaccctcactttatccaaacactaagtaatcagaatgggtaattatttcagtatttgggtaaaagccaaacttaacggaagaaggatcatttgcatacacactggcttcctatgcaaaaaggcccacaagtttcatggcctgtaactgagtcctgaccaaaggaaaaagcattccagtcaggccccaggactgtagaacacaatcttcttcctcaaagacactagcatggctagcatggtgaggctgaagtacaggccccaggcaaagttgggtttgagaatacaaattctattatctacacttaaaacataactttttcattatattagccatttggcacattaaaagaaaaaaaaaacctactcaagaaaataaaggtaaattaatataataataataataataataaaaactaaggcaggtggtggtggcatatgcctttaatcccaacacttaggagacagaggcaggtacatttctgtgtgttcaaagccagcctggtctacagagagagttgcaggacagccaggaatacatagtgagactttgtcttgcaaaaccaaaatcaaaccaaaccaaaccaaacaaaaacaccctaaaactcaaattctattaaggcattctagagacttccatacagcatagctaacatcaagtttataggggtgagcacgtttaaattagaaacaacttctgtagtggtttaagatacaagacaaatgtttcaatgagaaagttcttttatatacagatcagaatgaagttgtgggaggaaaaaagagcagaggacttgaaaagtatttgaagcaaacttttaaagttgcttattaaatcagtcccctcactgaatttcatattatcaattcttatgtaacttgtttgaaaaccccaaatttttggtaatttagtatctcaagtgaaaacaacacttctactgatgcatccaaacactccaggctcgaagcagcagcagcagcagcagcagcagcagcagcagcagcagcagcgttagctcttaagcagccccttagtggctgaggaggagcaaaggaaagatgatagcagaccttaagtttcatttttacaaaggcccaactaaaacttaatcttaggtcttaaaaacttataattagatgactccaaaaacaaaagtgtcaaaacctcttattatccctaaattatcttaacttttcctacatttgaagaacggatggatggcaggcctgggcttctggacacaaccagtgaccttttcgatagtaaaaagcaaacacccttagtaaggatcccggaatattttcaaacacacacaattgtgatcacagtctgaatatattgtatcacactgtttagtatactgttatttcgtgcaaattttctaaaacttactccgtagaaactacaaaacactggactatatctgccacactcaaaaggcaacatgaaaacactaacaaaatatttttgctaacactaatttttattagaacctaagacagcaaccatcatacccagactgaaaatctcaagtttcattttatttggggaaaaaattgtacttaataataagcaagttattttggtttttggcttagcttggcttttaagttctctaagacagggtctcctgtggtccaggctaggctttaactttaatgtagccaaagatgactatgaacttctgattttcctggagacacctcccaggtgctaagattacaggccataataaaagcacacctggtagtaactttgcttataaaaataagacagttgtgtttctatcactttgttttaaatattttgttcaaaaatattaattcactgataaagaattactaactggttgataaggatagtctcttactatctgacttaaaatctaacaaaactgctaaatgccgatttttcactataaatatagtacttattattatcctaaatgaatgcacagaaaactttgatcatgcacaacaatagcatgagcaactgtgcaaatataagccatcattcaaaatatgcaacagtagcatcatggcaagccaataatcctgaattcaaaaaggatgtcaccagagctatgcccactttagtgtaaaaatagtttattcaaattatttctattccactttaatttcaagacagcaaaaatactccaaagcaaatgaaattaacatatcagaagtattttgggcctggaatagtaatacaagcctataataacagtccttcagaggctagaaaactagaatatatacagtgagtttcaggccagcatgagctagagaatcagatatatatattctatgtaggtactatgtgctatatataatgcattatcttacataagtaatagaaacattaagtgctgaatatgcaatagatttcctagaagtaattttgggtagaggcatttcaaggctctaatacttcaattatttttaatagatagtgacttttgtaaaatgtgaatcataaaaattgcccctatttgtcaccttaagtccactctaagaaaccatagaaaaagaaaaaaaaagaggtagaaagcattatagttaaatatttttgacaatttcagttatgaagcattatgcaaactgttcaaaaagagaaagatacttccttaagttaatcataaattagaaaacactgtgaagttttaaagtttaaaaaaaagataatttttctcatgtttttataaaaggaattttgatttttggttttttttggggggggggtgagacagggtttctctgtgtagccctagttgtcctggaactagctcttataaagaaattttctttagtaagcaagtttttaattcatagacttaatcactataaatctattcagttgaattaaagcaatgaatactatttgcttttcttgatgaatatgaagctactgtgacaggtcacattggttttcaaaatattttagtatatctaaatcccccttaacttcaagaaccaaaattctaaatcagtacttacatttcctctaagaagttaaaaaataagaccttgacattttattctgtgtaaagtgggcacaaaatgaaattgtttaaaaaaaaaaaaaaaaaaaaaaagccgggcattcgtggcacacgcctttaatcccagcacttgggaggcagaggcaggtggatctctgtgagtttgagaccagcctggtctacagagtgagttctaggacagcctccaaagccacagagaaaccctgtctcgagaaaaccaaaaagaaaagaaaacccaccaaaaacaacatagcaactattctgttcctagaacacttataattatcttttcgatccctaaaaataaaaccaagaaatttaatgtcctcccttggtttctctgcatctctagactaattgaaaattgcatgcccaatccaaaaaaacttcacagtgtcagtctttattttaggtaagcaaaacactttaattcaaacaggctgacaacaaatggcaggctcagaaagtgacacacatctgagaatctcagtcaagtagccccatcctccttatcctgagaaaggtgaaggtttctgttgttacttgtcagaaatttgcatcagcacatttaacttcatcagatctgaacaaaggtttagagtaaaagtctaagactaaagaaaatgttaaccacagcaacattaaagatacaagcagaaaagtaactccctaaacaattatagagaaaactattcaaacatgaaaaaaaaatccttatttttaagggtttgatgctagatctcaaagtatagtagtatagtaggatgaggttgaccagactatcctcaaacataaaacaatcctcctgcctcaaccttgataatgctgggattacaggcctgcgcaacacacctgcctttgcctgcttcctttcaagtacacccctcctgcatacccttctaaacagcaatacgagcagagtttactaagaacaactttaacctttctaacagaggcccaaaatctcacaatgccaaaagacctcatgaaataaatcattttcttatagggaaatcttcagtgaacaaagttcttataaagaaacgcaggccccacaaccgtcagaaaacctagttaggtccagctccaacatttagtaacaacttgaccttcttgaatccacaatataaggcaaaggtacttgatctagcatttaagagattccacttctgcagatgtctaagtgcaatcaagtcttctgccacctcagttatgaccatgcccaccaaaatgtctccagacattaccaaaagttccagatcaagtaggaagggatgctgctgagtgagcacactataccctgaaaataccacatatttttaacaaaaacaaacacctacaaatctcagcttacctcacattagacagatggaaactggggcataaatttaagctgtatttggggtctgctacactgtgtcctttgcattccagcagacagcctttctaattcactgggccttgtctacaaaatctgcatatttcctgtgtcaggctacttaggacttatctgtatgtctattgataaaatgcacctataattactattagttcaaatgggtatcccatgaagactgaagtcatttcatggataaagcacttactacaaaggcacaaggatctgagggcaggtccccagcaccaatgtaaagccatggccggtggtgcacatctgtaaaccagcactggagggcagagacagaatataggcggtctaaccaaaatgaccggtctctcaaagagagaccctgtctcaaaagataaggcagagagcaatagagggaggcacccatgttgatccctagcctacacacacactcatgtatatagaatacaacacatcaattaggtttgtttgatgcgagataatgtaatacaaagacctaaagacaactttaataatatctcccaaaactccattctaagagtaaaagaaaaacttaaattctatttaacttctagtttagagaaacagaaatactcaaaaacaagtctcataaaagagaaaaaaattttaatgggaaaaaaaatcaaaagcaaaaatttgcttccagcgttaaacatgtatattgactttttggatcactcttaggaatacatctcatttaaagatacgtgattgaatcagttacataccttgagtaattacatcctattcaaaaatttccaaagtaaacaaacaaaattaggtcagcaatcacttcattaaaaaaaaaaactattctacttcagcctgaaatctgcagaaattttattgctttttaaagaaacaagccagttattctgcagcgctctagagatgcagcacctatacacttgccacaatacaggtacacagaagagaaagacggaaattgatttagacaatgtagcaggcttagacatcaactttacaacctgtgttacaccaaaaatacacctaagttacaaaactcagcaaaagggggggaaaaaaacacaagaacatatagccatgaaacagttacagcaacattcactctgcaattcaaaatcagtaaattgaaacccctctggaaattaaggtgctccactgttgaagacactaaatatctgaaaggtcaatacaagccaaggaaagaagtaatgttccctgtcacatgcaggtagccagattggaagcttactgcctgttccttctccttgataagaaaacacgtaagcttctacgatggctgggggggaggggagtatataaaggcactccctgcaagcctaacaacccaagtgccaatcccagtgccaatggaggaggaaggagagaaccaactagctaagctgtcctctgacctccacatttataccctggtacatacatgccccattttgttcctccctctcccaaataaatgaatgtaatttttaaaaaggggggggagtccctttagctttttctatttcaaagtcctagttatatggaaaatcttgcccaaacatgaaaattcagacaataactttaacttatactaattcactgcagattatattatatatgtgtctgttataatggatgtaaattgtcagagctgcatgactaccacaaaaacctgaacctgaaaggacatgctgatagagtttacataactctgagctatacgttagaattcatttattagtggtgaggattattctttgtgaaaaataactaggatactagccaagacaacctgactcaaaagagcaaacatatcacatctgcatcatagattatagatgccatatatatatatatattatataaacatacattatgctataaatatgttacatatttaaatctatagagtactatgggaaaatttaatcttaaacagattaaacagattatgctaaactacaagaaagttttcaccttccccttaaaagctgaaagcaaacattttctgatatgcatgattaacttggttttgagcaactctatgagtgaatagcaaaattaaattcctaaaggaattccccctattaaaaaaaaaaagtcatatcttgagtcaattaaaattgcaaggtctcaactgagcaaattcataaacactgctcatcccataaatgaaaatacaaaaatctctgacatatcagaaattgttaagagtagtacctctgactgaagtatttacaatgaggtagataccacagtaagggtactatttatttatgatatctgttgttttttcagagtctcactatggaaccttggctggcttggagctcactgtgtacaacaggatggcctcagactcactatgcagtcagtccagcagcactagaacttaccaaaatcctcctgcctctgccatgctagaattagtcactaggtccagttatttccaccatttaatcaagataaacttgataaggtactattatccttcccttatttcaggtaaaataagactgagaaaaattaaatagcacaaagtcatccagctactaagtgacagagccaagattataccacatgcagctggccccaggccactctgtctgcctaaaactaagatgaaacaatgtataacttcagaatgtggacaaaaccagccacattttaatgtaatttaaaagactcaatcatgttttaaaatgacctccaaagcagtctgttctttaaggagaaaatccattttctagaacagtaagaatttgttaactttatactcacatacacacacacagaaaattgaaatataagttaagagtcactgttcatatttaaagtgttggcttctgattataactatttgactaattacacaaaacacagtacatttacagcttttccataccatacacatacaggtcaagaacattcttttgctagcagattcaactgcaatattcatctctacaaaatttcaacactaccaacaagtataagtctaaatactgtgaagacatccacaaatgtcctaatgccaactgttgccaatggaagagtgtgctattctgaacaaaaccgaaaactcccagccaaattcaattcatttctaaatcacgtttatgctgataataacatttctctaagaaacaccttcttgttccagtacaaattattttaaaagatgaaactgctaataccccttctgcaaccaaggaagagaatacaaaattagaaggaggagcaacaaaaccaatatcctaatttcatattttccaatacattcaatactgagagatccagtaaattattcccataacaaaacacctttaaacactcaaccaggaaagttatgtgactgtagaacggcctataaaaaaggatatgtaaatgctatttcacctatactcagtattggtgatatctccaatagcaactgtatcaatttcaaaactaccagatacaaagcaactacaaaaaatactgaatatttacagaaatcatttctgatataatcatacccaatgttctaaatcgtgatttttttttagcacaaatccttgtaacttttcttaaacgtagatcacaaaatcaattctccaatgtttgttctgcaaatcaagtttatctactgggtgaaaagggggcggggaggggacaaaactcaagagtcatcagctctatgcaggaaaacttctgttttacgagccagtagtttccacggaaaaagaaaaaacaaaacaaaaaaaaccactatccaataaattccttaaagtgtattagtaactagtactgtcttctgaaactaaatacttctaacatttcatggaagtcaaaaactgtcctatgtacacaggcttctagatttatctttaccaactccgaattcacatacattatcaatataaaaacactgtctatattttgtgcttactaaaaaaactgacacaaaataaaattgaaaactgagtatttactgaaaatgaatgttcaaaccttgtttttttcctacatgaacaattttctaatcaagtcatcaaacagactgttttagaagtgtctttaaaagtgttaaatactgttaggcacagcaaacaaagacaaatttcaagttgtaacatttcaaagtaacaactgagttcatttctagaaggtaagctagttcataatacttaggtatacattttatttaattacgagaaattagacataatgttccacacaatacactactcgcctttctctcactactaaaatgaaaattttaaaggcaatgaatctccactttctaaaactaagtaaaaaatcaacatggttatatgtcatatttaacttgatttaatctttactcaattttttaaaagcaataatttaaaagcaatctaagtctgcaacactatactgtgtcaacttttacaattgatagtaatgaaatttcttttccttctattgaattatatttaactaaaaattactagttttgactcattttacccctaagttttagggaaaataaaatttgcaacttcttatacatcggttacatagtcatgtttttcaggaaagaaacaaatgactatgaaaatgtaagataaagattgtagaattaaaaaataaaaactagaattactttaaacaatcactcgcctttaacaaaacaacaaacattaataatcacttcaaggtactaatattcccgtgatcagtatctgaaagggttcctaatctagcaaacaaaggcctgtaacagaagcctgagctctgcatgtgctttaaacacatgaaatcttgcaatctcacattcagcctattttctagactgctcagaatcaaatccaaccaacaaattcttacaacaattcaattttgcagaggatttgaaaacacagctttcctgagaaagtacatcattgctgattgctgacccttctacagcgaatagaaatatcccatttactagtttcagaaaggaacttaacttggccagcttcggtgccaacactgaccagttcaagtcttcaatgagcattttaactcctgcccccaaacacagaacacactgatgaggaatcaagcaagcccctctggcttatcaaaatcattgggaggacaactctcagaagagcaacggcttcaccgactttctccctatagactcaacatttggctcaataaaaccacagctctagaaattaagtgttattagtcatttgatgcaatatttgatactgctttctatgcacattatactaaaagtacagtttcagagctctaactcacagaaatggcacgtgcagaagcccatgtactatgcaatcaaataaggaactgcaatcatgtcactgctcacacataaaaatttggcaaaacaatcttgaagtccgacacacctgataattttaaatcaagtgggaacagcaaaacataagggtactgtggaaggtaagagaagcctgactaccaggcattcagatttttctttgaatgagggcctattttttttaattaaacagataccggactaattccttctatatctagattactatcactaatttataccaactgccttgaagcaagtgataacccagaattttctacaattacatttcagaaaaggtcaagttcatccagagtaaagttttgaaatataaactgaaaattaatgcaaacttcaaaattaaagataccttaacagattaaagattttcttaacagaaaattagcctacttctaaagccagttcttcagtgagtttcatcttcatttcagaacaaaaactcggtcaaaattagctatgcatgtttatatgctgctaatgcaatcaaaaaaaaaaaaaaaaaaccaaacctcttccaaatgaaaacattttcttacaaaaaaaaaaaaagcctctccataatgctcttattattatcaggacatgtatagacaagtctctgaccttctaccttaagaaatgtctgctggtatttactaataattaacttttactaagactatcttattaacaattatgcaattacataattttaactaaattctgctcattgctacaagtcacatgaaaaaataatttggggtcgtaacaaaagccctgtcacttcagagcagcaacttgtgttttcttcacacaccggcctcccaaaagctctcaatatctgtcaatacttcctccaaaaaaggagggctctcttcctatccctgatcaaaaccaataccatacctgaaactgcaaagataaatgctttaagataaccacgaacttttgaagtacaaagacctaacttttagacaatcagaactatacaccgttaaaaattcttgggtttctgtcttattcaacaagctgactcaggaaattactgcatttaaaaagctaccatacctacaatctgaagtcagtgatccactcttgctagtatttctgggcattagctggttaaattatacttgacattctatacaaatcagggtaaaacccatgggcagtcaacgggtcagagcacctgaaacacaaaaattttgagcagcaaattcctgttcacgataatagttaaatttcatgtgagagctgaggtttaacctctgcaaccattcgccacacacaatatccttgaactcacacggacatcacctgggaccaaaaactattcaatttctatcccatcatgtatggcaaagccaaatgaatgtaaaataccgctgaaatgcaaagctcatgcctcatcccacgtacaaagtctaatttaacaaagttctattaaaagctccaataacgcaaattctggcactgttgatctcaaactacagaacttctacatgtagttccaaagtggtaagtaattaccccagtttaaacacacaaaacctacttttaccctcaaaagtgcaccatctactctgaggatgactatgcttataaagttatgcaaatcagtccacaagttacattttagaaaaatctatcaacgcaacccaggaaactaacaatcactgcaagattctgaggtaatatgccttcgtgcagcacggactttcattttaatctgatctacaccctagatctagggcctaagtcacgatctaatagaaataagcacaacctcaccagcgtctaatttggttcatttagaaggcttggattaacgagctcgttaatccaatgtacaaaactctgcattcacggacaatagattttaggaagagaccacagagctagacaagaaaccaatccgtgccttgacacttgcaagcaggcatgagttccgtctagctgaacactccctaggttgaatacaccgggagagacacacaaaattgacgatctagaaatgtgaccagtattaaacgttatagtcaccccaactacagaaatttttcgcatccgtctactcccacgttatcagagtgacagaaaagcaaagaggaacagccgcagaaatggatacaggtcaagtctaagtcgaatccatcctcttgatatctccttttgtttctgctaacgatctctttgatgatggctgtcatgtctgggagcctgtggctgaagaaaaaggaggagagagatggcagaagctgctggtggcgaggcttcttctgcaggatggaaatggctctggacttggcggtcgctgatgcccctcgctctgctaccgcttggccctggaccgcagccgggtaatggctgctgcggcggctgctggatggttgcagcgactgggcctgcttctcctcagcagccagaggcctggcagccgaggcagcggaatggggagaagacggataatcctcgcagcagcggctgcctcctccggcggcctccggagcccgggccagggggggtgcggcggcggcggacgggaggctcaacaccggcccgggtccctggacgtgccgccgccgccgccgccgtgttggaggcaggagaaggggagagagcaactctccggcgttcccagccctggcaatggtgacaggcgactccgaccccctccccggagccgcggccgccgccgccgcttctcccccccgctccaggagcgggaggtgcagccgccgagcctgcgccggctcccgcccgagcccgcggcttccaccgtctgtctctctccgaagccgctcagaggctgcccggttagaatagacgacgaggaggcgaggcccgccgccgctgccgccgccgccgcccggccggctcccgagggcgctgcccccgcggctgctcacaggcgctgagaggggctctgggccgcggccgccgccgtctctcatctccctcgcctgcgccgggcctggcctcacagcggctcaactctcaaacttccatcatggctgcagcttccgagaggagagagccgagcgcagccgcgtcccgacgcccaagcgcgtatcctgccgcagtgcacaaagagtcccgccacatcaccgtgcgccggccggccggcccgccccctccgccgccccgccaggagagccgggcgcctccgaagccggaggggaggagagaagggatgggggggggggcgggcggggcggagccgggggcggggcgcgggcgggcgggggcggggcggcgcgcggcgcggagcatgcgcagtgtgaccgcggttgtctcccggagctgcgccggcttcggccgcggctcgcagacacccggccaaggtagggcgggctgtggccgcggagagctgcgccgagcgggatcgctggctgctctccggtggatcggaccagcttggtcgtgctggtccgtgtctcaggagcctcaggggcacggccctgcggcagggacacccatcccgcctccttccgcccgcccctgggttcctttggagcggcttgcgtcccctgccccgcgccgtggtcagattgcagtgcttcgctaggatttgtcagcgacagcctttacctagatggtgcacctctcccgccacggtgtcctcaaggtgtcaggctttgcacaaagaacaaccccctattgtgtctcccgcgtgggtcacctcatcgggctcgggttccctgccccacctctcgcttcccaggcggctgggatcttttgctcgaaaggtgaacgctcccagccaagcgtgatgattgtgcatacggggcgtgtacctacacgtctcccctgagtatccggggcccagaggacacccctgggtggacacgaagtgcatctccgtgaagagggtgcaccccacacgcacccttctgcggctgggtggcgagtcccgcagctccccgcagccgtgggtccaccggatcagccagcctccgtcttgaagtggctaagcatcccctcccgtttgtggccgctttgaaaacccagcagaactggatcgctgtggccaggttctgctccactcggaccgtgcacggcccgggagccggttactgggccggggtggggagtatggtagggtcggaagctgcagcctgcgagtgggcggggcgagcaggcctgggagggctcaaaggcgaggtggaaggatacacgagccacggtcggaactactttcaggaggaggtcacgtgtggtcctagttggggaactttccaaattcccattcccctatctgtgtgctcctgaggcaagagcttggacccttctgctctgctaggtggtcaccccaggtgggggcagccggacccctgctcatcccggtcggagcggagagcggcacccacgagcggtccgcaggagcgctgtcggggccaagcgcctggggagctggttacacaagcacccacattcaagcacgtgccccggccacccctctctgctggccgccgccggtttgtgcacggtgacgcggagagtccccagcctgcgcttccctttcgcttgcaacccatggagcgagccagaaggccgagagtcctgctctgggtctgcccacaccgcgcgttctcaaccgtgggagaagaggctgggcctgagggcatctgacgcatctcgtttgctaatgagatggaccctctgtagatctgtactcgcggggcaaaagggtatctcctgttgctgctggctgcccgggcttaccgatgttgcaacaaacttccagtcactgcccctgaactggtgaacgcgccccacctactgtagactcagccaagtgacttatctgagcacctagtcaatggctgtccgcccagaacaaacctgtcaagtaaaaaagcttactgccgggattggctgacctgtcgcgcttgagagagctggttcagaaatgctgataactagagtgcaagcccctcctcccggacgagccagccacaaagcgagcgatcaccttgagcttgaagaaaaatgacatcaacaccaaggcagggatttcttcctttttgttcttttcccagaggacttagttctcagggtgacaatttgagtccgaaagtatctgacttgagacctaagctgaggcactgggtcattttagaaattgggagattagtaatctattatcatgggtattgctgtaattgcgagtaggtgtctaggaaggccagccgagggtttatgaagtataggagaaagaaaattgcgtatgtgcacagcatagttgcaggcagctcctgaagcctagaaacctcaagaggcttggctcagagagccacgggccattacctaactccaggactgctaattaaaccagggatatttacagttctattagagatctctgaggctactcaaaccttgcatttagatgcatccttttaagatctctctgcaggagtcagcagcccaagctaagcaagcattgatgtttattgcaggctgtttttgtgcacggttctggtcggttgggggaggcagggaagacggatgagagcaatttgaaaacaatagaaagccctccatttggtttctaaagatgtaaataaatctaacccacacagcctaatctaagatggagatctattttacatataacccccaaagtcaaggtgttatatgaaatgcatggtaaaaacccaaggtgtgcccagtggaatatctactgtcgcttggtgaggaaaataaggatgaagttacatcaagagaagtaggttgaggaggggaaatgacccacattttttcctgtccccagagtctctgttactagcatcaccctattttgcctcttccctggagccatcttgtgtgacatagtcaaagaatctctaagacactctgaaatcttcctctataagaaaaagaaaggcactcattccaaagcttcctgatgctgggctggaggaaagaggatccgtttctgttaccagaacatcactctagagcacaggggatgaacatcccagcactcaagtgctggaacctgacaccagcccacagacacttccaagtgagggaagaaagccggaaaccagttaactgcttccctgaaggccaggttcctctctctagtggtgaatgaatagataactatgttggcccggtgtgtggccaggctgacaatagtatcaggttttgctgggtgtttcctctcacagcattaactatgtttctgaaagaagtactgatgtagacttgtaaattttttggtgtttttcacatccattcaaaggatgtgaataggtcagtaggggaaaagcccagatagcaataaaaaaaatatttaaagttcaaatgaaaatatatctgcttggctgtcctgatactacaatacactggttgcctagcacttcatttccttacctgtctggatttaaaacaccccagggagaaacagaagcctataacaaaggaggaattatataaagctctagggagactaactttatagaataattagggagtatgataaaccagctttaattatagtttccaacagctgattccaaaactgtattgttactacaagccaaagatgttcagagaaaagtcttccctggtttctttgataagtgggacaccaagaactggatgtggataatagaaatagttgatggctgttggaggttctgcactaaagtatcttgtgtgtgagccctccattgtcctggtgcctttctcctcttcccattctgacccttccaaaagagagttaagtctagtgctttaatttttttaagcaagtggtctgttttttgtttttttttaacttaaaaagcactttctaaataatagaaaataatggtttaggtaacatataattggctttgaatttaaactggccttttttaggtttctgaaggctttcctcttatttattctattatttatttagttttttaaatccacatttatttattgtctgtgcaagcatgcaccagctcatacacacaggtcatggcacattggtggtgcatgttagaggacaatttgcaagagtctgttctctcttttgaccacagcttctggggatctaactcaggttgccgggtttgatggaacacacctttacccactgagccatcttaccaccccacttactgttctcttaagcacaaacagtttgctcagcctgtcctcctataagtcatacacatactgtattctaggagaaaattttgcattacgatctataagctttccatactctaaactttcccaaagcttttgcaaatggctctctgtcacctttcctgtctcaggaaagagatattctgtatgatatcattagtctcaaacaaacagaggctgtactgggtgctggggtgccacagaacagaccacatggcacccaggaattatcactcagggagtgtcacaaaacaactttatttccattaattttgactgtcagatcttctactttggtcttaattccagttgtggctctatggaacatagcttgctgttttagcacttctaataatagaaactaaatgtttcagggtaacccacatgtctaggtataggagtggcgctgagatggaatcaagattgacagtgcttcttctagatcatcaactatttcggaggaggagtaccttttttgaaagagaaaacagacaaaacctgcttaaatcatcttcatgatgactggggagtcttatctccgtccttgtaatgattcagtcaacaaacacttgggacttttatgtgctcctcctgtcttaagctttttgaataagacagatactggccagcagggtccacattcagtaggatgagtcagctttgggaatatgaatccttggactgaaactattgcaacctcctcacagcccacaaagtcaagttaacaactatgatgcttgataactgattcaattatctattgcttcacaacaaatcacagtaaaaaaccagtgacttgaaacgaccatctttgttttcccacaattcttgaggaagggtgtggctgggcaattcttttccccactgttaagatcaagggacagatatggtctactcagctgtgagtttggctggatctggaatgtctaaggaaatttcaacctgtgtatccaggaactcaactggagtaactaaaatgacgaagagtttcactgtcttcatgaggttactccaaagctgagcctataacttagccatcatgaagagcatgggtgcagtttctcattttgcagccatctggatctttatttcatgggcatattgtatagttggcccctgaagccatttctcacactgagacacttgataactaaagagatactcccaggcccctaaattttctagaaaaaatgatgtttgttttggagactggctcttatttatcccaggctggtcttgaactcactgtaactgacagtgatctttcatttttgatatcccctacctccacctccagaaaggttacatgcatttactaagagtgagttccaggacagcccaggctacacagggaaaccctgtcttgaaaaacccaaaaccaaaaaaaaaaaaaaaaaaaagtcaattgaaaacttatacatatgtagataaatatgctaatctaaatctacagaaaatatctgagagaataaacaaaagtctaaaaagaaagggaaagcatttcagagagagattgacatctcttcgtgtgttgtttgtgtgttgaatgggttttttgggttctttgttttgtttttatcaagacaggttttctctgtatagcccccgctgtcctgcaactggctctgtagaccaggctggcctcaaactaacagatctgcttgcctctacctccacagtagtggaattaaaggtgttctttacactgatcatttttgttttcataagacaaaatagtgattttacccaatagaattaaagctaaaaataaatgtttattatcaaaagaatatcaaataaccagagaggaagttcatgtctaatttcattctcaaataagtgagctcgctaagaaatttccaatattgaagcctaaaggtctgctcagtatctgccataaatgatatctagaaatgctgtgtgctacaggggtgctatgtgctacaggggtgctgtgggctatagagatactgtgtactatagggatgctgtgtgctatatgagctctgtcttgatccaagtaccctctcttcctgtatcaactgcttcaactaggtctatttttcagtttttgtactacttagcaatgttctgctcaaaacattcttttcctctagaaataattatatttctacagcaccaaagtcttcttccaccctacaacgtagcagacttctctgtgataggatagaagattgagaagaaatctcaaagaccttctcattcaccaacctcattgtacattgtacatgcaaagaaactaggaacaatgatttacaaaacattacagatgcttaggagcctgggaaatttctttagttaaacaaaaatggggcaaaatcctagcttttattgaacctgaacaaggtaccagagggaaattagactagagatgacttttcataatatttctagccctagagttggacacagactaaggggataagatgtgattggtgttcattgtctgccctctgtttcctgaacttagttccaaggatgagccttaaaaaaattcaaacgtgagctgggcagtgatggctcacacctttaatcacagcactcgggaggcagaggaaggcagatctctgtaagttcgaggtcagcctgatctacagggcaaggtcccagacagccaggccagggcaacacagagaaactctgtctcgaaaaaccaaaaaaaaaaaaaaaaaaagaaagaaaagaattaaatgaaagcctgaattgccacatattgtaaagaatgattggaaaagtatttccaagatgtatgaagaaggcacacatcagtgaggactgaaaagagaaaagaaaggaaagaaaaggtcactaagaggtctttcttaggaagaaaacaccaaacttcaccaaacaacaaagggaacgctgccacctgctgaaggagacaatgagcattgaacacagtcccaggcaggtcaggggagagagtttaattgcagctttcagggaacgcttgtgatggggtaagacagtagtggcctactttcctatcccttcttccatgaatatttatgactgtaacatttttattcccacccccaaacctaagtctcataatactaaagtgtttatttaagtattacatgctgtgggtaaaagttttcagtggctcaccattcctcccccttagaaatgaatctctttttttccacttttgttctttacatccctttctcttctagtgtatttaaatatcaggtggatctcagagatccaggccagcctggtctacatagtgtgttctaggacagaaccaggactacatagtgacaccttatctcaaaaaatgaacaacaacgaaaatcagtacacacataaagaaaatttgcaagaaagaaggctagaagaaattgctgttgtaccttttatctgtcttcttttttcatctacaactgcactttcctaactcatgtcctctcttgcctatctatccctccatttttctcttctttattcttctatttcaagatgccattatgatattgtttggtgccctttggttttcctgtcatatgaatggaataccttttttgtttgtttgtgttgagacagggtttctctatgtagtcctggctgtcctgaaacttgcttatgtaagccaggttggtctctaactcacagagatctgcctacctctgcctcccaagtgctggtatctttaatttttttaatctgattttggcacctagtcatagaccacatttagttctgtggttacactaaataacagcccaaagcagctatagaccttttccagctagggtgcttcttgttttgttttttattaaaacaatgtgtcagaatctaaaaaataagtttgcaaggtactcccacagtaacttcagtttctgtgtctgctaagaacatcagaaagaacactacagaaaagcctaatgttgtcagatccaacctgtcttttctaaagacaataaaaagacagttttcttttgtgaatcttggccacttaattgtatatcattaatgtgttcttgtgaccttgttgattgtaagatacaagactgtctgcatttcaaatcctgagcattttacaatattgagcatgaactgatcaacaactattaactggtcaacttttcctataatttgaacttggcacattaaaatttctaagttcattatccttttgtaacacagtctttaaatctttttcagatttattttttgtaaatgattattttacacacacacacacagacagacagacagacagatagatagatactacattgtcatgaatggttgtgagctaccatgtaggtgttgggaattgaacctgggtcttctgcaagaaggagtgctcttatccactgagccatctcttcagccctgtgatggggtcctgacatgtagcccaggctgcctttggtttcatagtcctccttcttatgtgcctggattacaggtatagaccactacttccagttaaactgtctgtcttttttttttctttaatttagaactttgtctaaattaaactctcttcccttacaaaagccattatattaattttgaaaaaattacatacatttattttacatgttactttagaaatgtacttttcaactatatccagaaatttgtgggggaatcctcccctttttttctctaacaccaatctcctctgacagcatcctcggctggagtctatatcataaattaggtgaaaaaatcttgatgctagttctccaagactgcagaatgctttttttctttcttttcttcaagacagggcttccctatgtagccctggctgtcctagaactcactctatagaccaggctggcctcgaggtcacagagatccacctgcctctgcttccccagtgctggattaaaagtgtgagccgccaccactgcagagtatgtctaataaccttttttgttccaaacatctatttgctttccagtttacaaggacaaagaaggactttaaagcatttgagcttcagggcacagggtgtaagtgaattatagtgccatctctgctccttatgtagaggacaacttaaaaaaaagaaatgtggaactcacgaatagaaatacttacagagattgtcacaaaccaaattacagacataaattaaatggctcacagaactctggagggctgtttcctcaccagtcacgagttatctaaataaagtagtgacagaattgctcaaaaagtaaagatatgggtgctggtgagatggctcagccattcagagggctcattgctcttctgaagtatctgcattcaatccccagcacccatgctgcaatgtcatggcagctcacaaccatctgtaactccagaccagggtatccagtgccctcttctggcctccatgggcacaggtggcacatattcaagcaaaagacccatacacataaaacaaaaataaattaaagatacatacactttaaacataccaatttccaaagcaactgttcccaggcccggagaagcacagcagtgtgcttcagaaatgttcttctgcgcacctcaggggcaccagcgccagcagttctgagtaggaacatgggcagtgagaaacgatgctctactgttactggaattccagatgtttaacttgtcatatgtactccctcctaaatcttattttcctaaaacccagcctggtggttttccttgctctgttttcccgatctcctctttcacagcagtggctcacccacttagaaaggaaaggcatctgaatgggagaaacaacatacagtgagcttctgtacccttgggttctgcatctgcggattcacccaaaacatgaatcaaagatatgcaggaaaaagtaaactctattctgaatatgtataggcagtttctggatgttattctctaggtcgagtatgacaactatttacatagtatttacattgtattaggtgttacaggcaatctatagatggtttatgcaaaggtctaaatacaagttatatgtaaattcattgccatcatatgtaagggtcatgagcacacatgtactctggaatgagagagtggttggtcccagaggcaaacccccatagatgctgagagtggagtgtaaaacctacaaggaactaaggagataatccaaaataatgaaattggtagtgaggagctgactgatttttactaataaactcttttgaaagcaatttttttttctgttgaactgaagagtctattcaaattgtcattgattagtcattgaaactaaaaccatcaagtgatgtatagaatgtaatttggaaagtttttaaataaatgagtggcataacaaagcaattccttccacttaccatctatttatatttttgaatactgctacccaggttttataaaataaaagtaagctgggcagtggtggtgtacacacttaatcccagtacttggcagggatctttatgactttgagaccagcctggtctatagcacaagttccaagacagccagaggtacatagtaagaccctgtctcaaaaaaaacaaaacaaaaaaaacaaaaaggttctggagagctggttcagtggttaaaggacccaggctcaatttccaacacccacatggcagctcacaactgtcttgtaactgcacctccagggatgggacaccctcatatagacatacatgctgacaaaacaccaatgcacataaaataaaaataaataaaatattttttaaaggataggtggcatggtgtcaccttgtctccttatagaaatacacaaggttcacatatgatatataaccaatttttgttttgttttgtttttggagacagagtttctctgtgtagctttggagcctatcctgggactcactctgtagaccaggccagcctcaaactcacagagatcctcctgcctctgcctcctgagtgctgggattaaaggtgtgcacaccaatgcctggtgacatgtaaccaacttttaaaactctactgatcaccaacattgtcagccaggtgtggtgacacctataatgtggagacaaagacaggtgactgcacccacctgtcagtttgaggtagactgctttgcaaagtgaattgcagaccagccaggttacataggaagaacctatctcaaaaagctaacaataataataaccaacatttaaaagttacaatgcatcaattagatgttaaaatagtaataaggtaattcagaatttttaactcatgggaacattgtggttaaagatatttaacaactgattttagtttgggggctttgtttttaagatttatttatgtatatagtattctgtcagcatgcatatctacattccagaagagggcatcagttcttattatagatggttgtaaattgtcatgttgttgctaggaattgaactcaggaccagtgctcttaatctctaagccatctctccattttgagggctttttgggaaaggcctctctttggaggacaatggtgactatcagatcactgtgatagtcacatcgaatttggtacatttaacaattccacttgttctgggcatagtagtgtaagaccttcggaaagctcaggcttccaggatcttagcccaggaccgtggccaccccaatcaccaggctgagtcaaaaagcttgatgcaaactgcatgtggctttattgtttaatgagctaaccccatgttacctcgggtttttcatccatccaccaaggtggatggctacaaaagacagtttgaagcagctgcatacagatcttatagggcagcgtaaggggagtgtctaggggtacacacaggcccaggattggtgtgcctccaggcttggagggtttgccctgtgttgattggtcaactgattgttatggcccataggccctcccagggtggttgctatgctctgagcatcattgctgtgcgcttgtccataaagcacacccagagccataaaacatagcaccatcagctaacttctgattggttccttgccacgaggcaagcatctaacctctagtgactaaggcaaggtcagaaaatcaagtgtgtctggctgttatggctgctgaaatggggagatggtcccttcattagcacacacctgtaatcccagcaggagaatcaagactacaagagacattgcctcaagggggagaagatgctacttctaaacattaatgttagcgctagagtttgctcaggggttaagagtgcatatggcttctgcataggatctgacttgggttccctgaaggtacaagggcagcttataactgcctgtaactccagctccagggcatacaaagcctctagcctccacaggcacctgagctcaggtatgcaaacccacagagacacaaaattctaaaaacaacaaacaaaaactttaaatgtaaatgagtaaattacattctttgtaactactcagagaatttgattctaactctaaaatgtgctagaaatatgttctgtttgaaagcaaaaggttttgtggggtaagctacaaagatgttaggcgcatattctagccaaactttcaaacgtgtgcaaaaatacacactgcataaggatgtttacatatgttatttgaaatagtgaagaagtagaggggccagagaggcagctcaaaagttaagagctcacacagctcttcctgaagaccggagttcagttcactcccagttgtgagctgcctgtaactccagctccagggtgtctgacacttccagcctcttcaagcacctgcacacatgtacatagacaaacatgtaatttaaaataacaaaaaatgttattttagaaatactgaccaggctgccggtcggtggtggcacacacctttaatcccagtggtctcttttcttgtcctgacaagaaagttctacatactccatcaagcttgaagacttgagttcaatccctgggatcaatatggtaaaaggagagaacctgctcctgcaagctgtcctttgacctttacatgtgtactatgacacacacacccacacagtaaataaatgttaaggatgagagaaaataactactaacatttattggataacattcagaaatgtgtgaggtcatgaaagagcatgcacatcttctaaagatcatcccttgtttctacaaagacactgggtgtgagcattgcctaacaaataataatgaactgataacaataacgattgaccatctactgctattaggtgacctagaggtatgatcaacttaaatagagctctcacatatttcttacaacgtggccctataccgtttccctatcacacgtgctaaaatcatctatcttctccaacagctgagtctttattatcacttctgcaattttctgcctgaaggaattttctaaggttttccgtatcctgtaagtactctcctggcagactcatcctgttagtccaccagacatgcccagacaaatgcaaaccttaggaatgaacgatgtcttcttgcaaatatacttccaccaggagagaaagaaacaggaggacttggcatctgaattattgtatttactaatcggagtatatatcttaaagaatgaagcagcagaatgcacactgtatccatggacattaaattaaattggattaccatctgttggtaaatatttccaaattcgtgctccaagtgatactttcccataactccattctctttcaagcaaactaaggcatttccttttatttgttccttttatttgtttattattaacttttgtttattattaacttttgttttatgtgtgagtgtttgcctgaatgtatttttgtagactgtgtagacggctgatttgggtggaagccagaaggtggtatcaaatcccctggaactggaattacagacagttgtgaaccaacctggggatgctgggaactgaagcaagtacttttcttaccaactgagctatctccctagtcctttgaggcatccttggattagttactatttttagctagtgtgtttattgtacaaaagacttaagtgtgtgtgtgtgtgtgtgtgtgtgtgtgtgtgtgtgtgtgtgtgtgtaggcacgagagcatggtatatgagagtcagtttttcctaccattgtaggttccagggctcaaactcagatcatcaggcttggcagacgtgcttttgagcccataaactagtttcattatgacattttcttttctttttttaatttatgtttttatttaaattagttacaagcagccaggcggtgttggcacatgctttttttatcctagcacttgggagacagaggcaggcagatctctgtgagtttgaggccagcctggtcttcaaagagggttccaggacagcctccaaacctacagagaaaccctgtcttgaaaaaccaaaaaaaaaaaaaaaattagtaacaagcttgcttcacatgtcaatcccagctccctcttcattatgacattttcatatatgtatatagtgaatactttgattatattcatacactcccatcatcctctcttttttccatgcctgcttcccatttgtatgagaaacttattcattgttgtgggccaatgctgagagaaacaacttgagggagacaaggcttacctggggtcacagttttagtccatcaaagtggggaagacacaatgagtttatggccgtgtggacgtttagtaaagactcgactcctcacatggatacaacctccaaacgactccctctagggacccacttccaccagaagaggccttctgccttagagctccaccaccttcaaaacagtgccacagactgggaaccaagaatcaaaacatgagcctgtggggatagttcacatttaagccataacatcataacaccattttacctgcttatctttttttatttatttttttaatctagaatctgaatatgagagataatgtcatttgactgttgagtctggcttatttcagttaacatgctgaaccctagagacataaattttgttcttgtgtctaaaactccattgtgcatatattagcatttgaagtcagaacttcttggcattggcttacagggactgcttaactggagtcatattttgcttctttgctcaccatttctcttagggtttctattgctgtggtaaacacaatgaccaaaagcaactcaaagaggaaagcgtttcagcttacatgatgtcccaatcacagtccataaagtagggaagtcgaggcaagaacgaaggaacttggaggtagaaacggaagcacagaccatggcagggtgacttactgacttgctcctcatggcctgctcagcctgctttctagcaccagcacatgggtggaaccaccttcagtgagctgggccttcccacatcaccatcaatcgagaaaacaccacacaagcttgcccataggccagtctggtgggtgcatttttctcagctctggtttcctcttcccaaatgactctagcttatgttgagttgacataaaactagccaggacaactttccccatggtctcaccctgaaaagggaactatgtattacatacactcagactgaaagctccttgggggtctaattagcttgaaggtttaaaagcaccatttctggagccagagtttgctttgggattttgcagtaccacttgccaaatatgagagatttgacagttacttaatctctgtattccagcatcctcatcttaaagtagggtaataatagtacccatctcatagggttgtggggagaggaggagagggagggagggatggagagaagggaagatgaaaatgtctcacatcttagaatatgtcactgagagcagatattgttttttaaatgtactctttgctgccaccctaacaccttggtttaatatttataagctacttcaatacttgctaaatgatgaaattattatcaacaaataggtgatgagaaataaaaacaagaattaagctgtcagaataaaaccatcttgaggataatttttgtttgtttgtttgggggttttgttggtttgttgtttttgagacagggtttctctgtactgtcctgtctgtcctggaactagctctatagttcaggctggccttgaactcacagagatctgcctgcctctgcctcccaagtgctgggattaaaggtatgcactactgcccagctttgaagatagttttctgtcttttactaaaatagttttacagcatacctgtgtctcagttaagagcttaagtgagctgcttttacttctggaatcttatgttagtatttcagggacagtccaatcacattcatgtgctggatccttctcttaagtcacaataatgtccaacattgtgacatgagcaagcatgcccacaacctactatcccacttactcaaagttctaaatgagagtcagcttcaaatattatctcccttatggactagctagttcctggtatatgtctcccacaaattagaaggatgctagtcccagctgaagtgtccaaaaagcaaaccagcgtgggctcaccaacaaccagcctcattgagaaggtacagtgacatttagaatcaaaacttcattctcactgtctagtttaatctgctagtaatttctgagatatttttgtttattttatatgtgtatgaatgttttttctgcatgtatatctgtttgcctgatgtttgtgaaggtcagaagagggcatcaaatcccctgcgcctgtagttacagtggtggtgagccaccatgtgggtgctgggaattgaaccttggtcctctgtaagagcagccagtgctcttaaccactgagccatctctccagcccctagttactaatttctaactttcacttcaatgaagctgtttgtatctctactaaagtttcctaatgaaaacatgaattgtgtaaatgtctatacgtatgtttcctaatgcctacccgtttttacatgtcagatcaatgctcaggtcagttttttttttttttttttttttttgagacagggtctctctctgtagctctagctgtcctggaactcattctatagaccaagtggtcctcgaactatagagatccacctgcttctacctcccaacctcttgagtgctgggattaaggtgtttgccactacaacctggcaggaacactatatacttttcaaatacaaaacttttataaatataacttgtcagctggatattgtcctgaaataaagccatccccatgtctttctacataatcaaggcatgttatataagctttcctccaaacaattagtgtgggatgttttcttaattactatttccatcttttgtttcctaaaggaattgtcaattgccaggcttagctgatactctgtttcctgaggtggggaagggggcacatgcatttattaattagaaaccaaaatttatagcttcttctgactgctgcagtaaaaagaataaaaaatttttacaaagcaaggttctccaggatatggagttctatttttattcaagaggccaacttttctctttcaatctaatgtattgatggagttcatttctctttttttttgtatttttttttgtttgtttgttttgtttttcgagacagggtttctctgtggctttggagactgtcctggaactagctcatgtagaccaggctggtcttgaactcacagagatccacctgcctctgcctcctgagtgctgggattaaaggcgtgagccaccaacgcccagctgatggagtttatttctacttctttaatttccccttagatgaaactcagtatggaggtacatgtgtaagatcccagtttgggggacactggggtagaaggatcaccccaagtttgagtttgaggccagactgaccctgatgccctgataaactgataccctgacttaaaaaaaaaaaaaatctgtaatatggaagtcgacaagtcatgggtttaacttcacatttgtcccaattagcttacaacaatgcaaaggtgtaataaaacttaacatggaaaaccctatagtaaccagtgttcttagtctacagctgggatcagcaataacctttttgtttccaagtgagtcagcagttaaattgtgtcccctgggcaatagttgcaaaggtgaaatatgacctggagggacattacagagcaagaaaggaagtacagtctccaggaaagagcagataaagaaaggcattagccttgaggatcagcagcttcctccaattcctctgtgttgatcaatcccagctcacacttgtaaaatcttagagggaaagaaaaaaatgaagcagagaggatgaaaaaatctagttgggccaaaaattgtctacctgatggagagcagcaaatacaacacaagaaagtgtcaaagctcactgatctgttctagagtctttgtttcccttgagataaggttcaacaggtaggttctagctcttcacaattctgctccagtccagttaggagggagtattctgttgccattgtgctgaggattgaaccctgggccttgcacatgccaggaaatgatgcttccagtaagtatggttttactatctttcttcccggttcactgtggtcaagaattgcttgtgtagtaaactagacatggtggtgtatgcatgtaagtccagaacttggggaggctgagacagtacagtagttcatgatcatccttggctaaaaagtgaattttaggtcagcctgtgataaacattaccagctagtaaatttatttaaaactattctctgcagaagataagatttctttatgttccttcatgtctactgtaagtattcaagactaccctcatttattatatttcaatgggcgatatatgaatgaaatggactctgattcaagtttctcaaagacatagaaagtaaaaacaatggaccccaatgggaactaggtcacttaacatttatttacagtgaaaaactgagcaaattaatcaaggggactgaagatcaactagatggtaaattaaatcaaaatggacatatcaaaaaatatatatttgaggcctagcaagatggctcagtaggtaaaggcacttgctaccaagactgacaacccaaattttgtcaccaggatccacatggtagaaggagaaaaccaattcccacaagctgtcctttgacctctacatacaaaatgtggcattgtgcactcccctatcatacgcatacacacactctaaatatgtaattgtatgtatgcatgtgtagatggatggatatttgagccttggtgacatatactgatatttctaacactgggaaagcagaggtagaaggaccacagaaagtcaaggccagtcagatctgtgtaacacattccaagttaggcaggactacatggtaagactgtgtctcaaaacaagagagggtaggtaagataagtcagtaggttcaggcactttccatcaaggctgacaacctgagtttgattccaagggctgtgatgttagaaagagagaactgactcctgtaaattgtcttttgatctccacatatgttccatagcacatatatgccctctgcacacacttacactcacaataagtaaataaaatgcataaaaattagaaacaaaacagaaaatagagctggcagtatagctcagatagtagagtgtttgactgtcatgtcatacacggaactctgggtttggtccacaccacgggttatggcagaggatgctggtagtctcaactttcaggaggaagaaacaggaagatcagaagttcaaggccacttgggctacatagcaaattagaggctaacctggaacacatgaaattcatctttcctctacacacagacagacagacagacagacagacacacacacacacacacatcaaaaatagtatttgggcggggcagtggtggctcactcctttaatcccagcactcagaaggcagaggcaggtggatctctatgagttcgagaccagccttctctacaagagctagttccaggacagcctacaaagacacagagaaaccctgtctcgaaaaaccaaataaataaacaaatagatagcatttggatctccactagttagtttgggaagagtctcttctttccttccttccttctttcttgcttctctctctctctctctctcactctctctctctctctcttcttccttctttctttctttctccctttctttctttctttctttctttttttcctgtcttggcatttaagtaaatgtaatctattcctaagtcatgttcatgtggaattataaggaaaagtactaattgaattgggaataaaaacatgatatagtgtgccatgtgtttctttgtaaatattctgacaactgtcttaatgtgctcaagatgccatagaaaaatgttaaaggataagtgagtagcttaattgcctcacttcaagatgcagctgacagatacagttcagagataagttcagggcaaatgaaaagatgccagctgacttggttcccattgaggacttgcaaatggccactttcctcggtatctttatgaaggaaagagaagatgagaggatgggagaggagaaggaagaaaaaagtaaaaggaaggtgaggcaagggggcagagaggttgttcctactggaaagggaacttatccctcctaaagggcctcatcctcagtatctcatataaccctaattacctcccagaggcccatctccaaatgtcagtacattgggaaacttaggaacattaagggaccacaaacattcagtcccttacaactgaaacatgatattctggatagagttctgggtaagtggagtgagtgctccaccctgtcttgttctagggaagataaggagtagtaagtaagtgaaccgagaataaccgatttcaaagcaccccccaaaattagcagggaggttttccagattttttattcccaaacagagttttcttgtctatacaatggcaatctgaaagtcagagcctcagaacccataccacagcagcgacagagagagctcagagagcagttaagtgttggccaggtgtggagtagaagagaggggataattaagaatgggttacaccagggaggtcttcagagcagtcagactgatccatatcctgattaaggtggtgtttctatggatttattcttttattaaaattcatggagctatacaaacatacacagactattttactgtatgctaatttaaggaattaaatgtgatcctgtttcattttaaagatttcatttatttattttgtgtgtgttgagggggagacatccatgcacagtgctcactaggaggccaagagaacatactagggagtcagtttcttccaccagggattaaaatcaggcccttggatttggtggaaatgcccctacccattgagccatctcaccaaccatctgagctgttgtaatagtagacaagaatttctgaaggaatatatgcgaacatgtcaaaatcggaaggcattaagttctcacaattaccttgctgaaatataaaattcatcaagctcagacacctggtctccccgggaaaggagttggatattgttcccagtcaacattttgtattcttctacctcgtatccatgacaactcgaaagctagtgagatggctcacggagtaaaagccacacaaatctgacagcctgagtttgattcctggatcccacattaaggtggcagaagagaaccactccataaagttgtcctctgacctccacacatgtgctgtggctcacttaaactcgctctctctctctctctctctctctctctctctctctctctctcacacacacacacacacacacacacacacacacacacacaaatttttaaaggatactttctacagtgccctcataagatttctcattgtagagctaaaagcactaacttatcatatttcttttaaagggccagttatagcctatgtattgttttgacaggaacgaggtaccatgagtaagagggcaggctctgaactgagactgcctggtttaagttcgtgaccagtactgtggtggataatctgagtggttgtctacttgacacatctgggaggagggtacctcaattgaaagaatgcctgtatttgattggccctcccacatgtctgtgagatattgttttgattgctcatttatgtaggagagctcagtagcgtctctaagagtgggactggggctgtttaagaaaggcagctgaacactggcctggaagcaagctgggttgctccatggtttctgcttcaagctcttgccttgagttcctgccttggcatccctcaatgtaacctaaaagatgaagtaaaccctttcctccccaagctgcctttgataatggtgtttatcacagcaacagaagaaaaaaacaaaacaaaacaaaacaaaacaaaacaaaacaaaaaacccaggacagatgcctactatttagtaagataattataactgctttcatttccttatctgagaatgactaaattacttagtgcattgggttgcaagaattaagtgagttaatatataaaaagcatttactctggtgtctggcacatattcaatgctagataagtattctgtcaatcatagtactttacaggcccctacatgacatcataactaattaaatgcccaaattacgtttgtacaacaaagattttttaagtttatcaataactataataaacctttagttgaaaggctctgcatttacaaccatcccaaaactgtgacaggcacagcatacacgccaagtttttgctctatctctggtgaagaacagaaacattctctagttgacagcaaatccaataagcctgaaagcactgagtgcttacagaaggaagctcgttggaacctaaatcatgttgctaaatctatagtgttcacactgacagctccagttgttaagtgaatgacaccttctagattcacagtgtagctgtactgacttcatctgtgtggctccacaagtaaaactcagaacagggaataaagttctaggggaaaagatttccaatctgtaaaaagaacccatgctgaagcatcctctgaacacacaggggtctgccagggaagtaagggaattccacatcgccaagagataatgtctatgggataattacgatcacaataatcttttagtgattattgtgtatgttccaattcctttatgtacattatcctcaaccccatcaccaaacctataacacatacattatgtgcattttatagacgagaaaatgaaggctcagagaagtcaaataaattggccccaaatggaaagttagtggggaaagctatggtttgatctatgttctctaactgcacagaacacgcacatgcacaggcacacatctttttaaggagactggggactgaacctgggacatcgtgcatactaggcaagtgtgctaccactgagctgaatcctcagtcctatagcatacattcctaccgtaactctacagtaactttgcatgaaaatgcaacatttaaaccaggcgttggtggctcacgcctttaatcccaacacttgagaggcagaggtaggtgaatctctgtgagttcgaggccagcctggtctctagagcgagtgccaggataggctgtctcgaaaaacaaagagagagagagagagagagagagagagagagagagagagagaatccaacatttaatatttctttcaatcccaagaacctattatttattaaaaatttaccttcctagatatacaaccagctctgccctaatcatttctctagtcccagaatagcagggatctttctcaaggggaaagatggtctgtgccaatctttcttttctattttgaaatggtctcattatgtatccctcactgaatttgctatgtagaccagcctggcctccaccatagagatgtgtctgcctctgcttcctagcacaaaagagtgctgggattaaagggtatgttgccctgccagagtctgctacaagttgtagacattaacttattttaggctggtgaaagctggtggtctattaaattaatatattccaaagattttataaaatagtacaaaggatagtaggtcagacacataggtgaacaagagaatttggaatattatattaaatatataattaatacatattaaatataaaatactctccatcctgcatacttaaaattattaatttcagtggaaaccatttatttcttatctacccaacatatgcttagcagaaacagattttgggatgatactaaaatagaatttcataagagccaggcatgtaggtcagtggtagtgtgttcaccttgaatgcacaatgattcaattcccaacacaacaacacacacacacatttgccaagacttgggggggagggtggttgtgagtgtgagttcaagtactctaattcttgatttattcacacgaagagtgaattattcatcaaactaaaacactgtaactgtattgcatgcttttagataccattcaacgaaaccgcctgacctgttttttttcaaaagtcccaagtatgggcctggaatgaaggtgggctacagttcagcaaagtccacctacacagaattctaaagtagctgttaaccggctacgactccctacatcttttgagctttttacaaagcacatctttcttttctttctttctttctttctttctttctttctttctttctttctttctttctttctttctttctttctttctttctctttcttcccccccccctctctctctctctctctctctctctctctctctctctctctccccttttttcagaagaaaacactgaggagtcagcctcttagcctcttttacccaccctccatccccttgtctggttcctcataaaccggagaattcaggagacataaagagatgggtgtgagcatgcctctggcgttgggttggtatttaaacttaacaagcggcaggcaggaaaggtagaaaggtttgcgaaattctatcaggtgcactattttggagctgaatagggctttcagctccgccaatttagtatagttggtttcctgcagctctgtaactcaagtcacaggctttgcttcttttctttcttcccgagtcctctgttttattctcctgatccagaaacaatgacaatagaaggggggaggggtggggattttaagcttggcttgccagtgagctgctgccggttccccgtggtgaaaggagaagacccagcagggttttcaacgcctaaaattagtcaactttgcccttggttttgcctgtggaagaaatacattcatctctgaatcaatcagttctctctctctcctctctctctccccctctgtgtgtctgtgtgtctgtgtgtctgtctgtctgtctgtctgtgtctctgtctttctatcccctcctttctcgataggaaagcatcttaaattttaagagtatatcagttggttaagtgcttacaaggcaaacataaggccctaagttcaaatccctagaccccaagtaaaaaaccgtgggcaaaggcagccagcacctgcaaccccagtgctggggggctggagacaaggagattcatggagctcagctcactggtcagccaagctagccaaccagtgaactctgggctcagggaaaagaccctgtctcaaaaaattaaggtggagaatgatagaggacacgtttacctctagcttttacacctgggcagatagatatgaacatgaatatagatacctatgccatatcgacaaactaattaatattttagtaaatgtgttgggcttcagtgcattaaattttacatgaataacaactctgatgttatcattgaaggtaaaaagtaggctgtggttgtcagaaaaaaagatgaaatgtcatgctgggcatagtggcacacccctttaatcccggcactctggaggcagaggcaggcagatctctgtgaattctaggccagcctggtttatagagtgagttccaggacagccaaggatacacaaaccctgtctcaaaaataaaataaaataaaataaaataaacaaataaataaatttaaaaaatgataaaccagcagctcaatgaagacttcatagtcttctatgtgtgtctttagaactctgtgagagcaaggcctgtacagacaataaagtgatgttgataagcagagctagcactgacaatggactgagaaataatatccagttattctcatggattgatcatcctttttaattaattatttttaggattttttgtttgtctgtttgagacaagtctctctctgtggcccaagctagcctacaattcagtatgtagctcagattggcctcagactcctaaaaatcttcctgcctcagccctctgagtcacagttgtgagctcccacacccagcctaatattttaaacttattttaggatcatagagatcaagttttacaggtttctgtagaacattacaaatagtttatagatgagtgagattcagggaggtgggaataattgaaattggaaatgagtgaattaagaggtcacaggaacaaatcagaggttaaagtttcagacaggatgccacagctgaaaagtgtaaggggtcacatccacttgtaaagtcaaaagagatgcataaagttgctctccttagaaacttctgagagtaaggaaatgttaacttcaccatataacgaaactatcatctgtgatatgataccagctaaatagattttggttgcctgctaaatggcaggcattgacattacattttatatgcatcgtatcatttaattctcagtgctaacccatggcgtgtttactgtatagttctcaaattaaatgtaggaaactgaggcctgtgagtagaagtccacagtcaccctggtgtaaattcaaacctaggactataaatcttatgttcttttttttaaaaaacaatatatttatttttcatgtgcattgttacaaaggtcacagacccccgcccctggaactggaattatagacagttgtgagtaccatgtgttgagccccagaattgaaccccagtcctctagaagagcagccagtgctattaactgctgagccatctctccagcccaaatcttacgttcttgaattctgtagctatcaagactggtcctggtatgactgttatcttataaagttaccatggacagatccatcctgatgagtcagcaatatgatcagtaaaacaacccatccactgccttgtccctgaactatcgtcttgccccatcataggataagtccacaggactgtaacccgagaagcccaattagatatgccaaatttgagaaacagtaacgagaacactttaaaagcccttctatgtcctgggcaccttcttttttagagttcacatctgacaggagaatgcagattgcacctacagttttgtgacttgagtaccatactaatggtgagcatgctgaactatagacatatattgaaagaacttccacttataacatctaattgctcaaagtcttcttgtccgtttaaatttgtttcacataagcttcgagattaaacgttatactactgaatggagaaaaggctgtgtttgggtgggggaggggctagggtttttgtaagcttaattttttaaaatgcaaaccgctggtacctggtattttccgaagcttccaagggcattttcctagaatcaggtaaatgagagcaagcaagtgacctacttacagccaaagctgctccaggttataaaagatgggaagtcaaatgtatcctggaaccccggcatctggccttgttttatgcctcatcgatcaatctgttgttactggagagaacatttcaactgtggtttctaaagaattcccatctttgttattcgtatccaatccttctcaactcctcccccatttacaaaaccacctggaagggtatttaagaaggtctcagaagaaacccagggcggttactctattgtctatgccttgaaacttgctaatgaggctaaagtacggttagacagcttgttacttttttttttttttgcaagcagttatctgcagatagtaccatttgaatagtttagcttgagtgacatataaaagatgaacagaatattgcagatctaaaataaatacctatattctagaaaagtggttttgggtagcaggtataaggaaaaccggacgatgaacagttcttattgagaaaagggttatgcagaaatgccaggctattgtggcttagttctctcctactaacattactcagtttatacacttttaaaatcatgtacaatgttttaaaaacacaaaagcagggaagatgagattacaccaagcaacatgctttcttaactttactgctaccttttaactctgtgctttacatagacttcaggtaccaatttaccttgcttccaatttttttttttttttttttcgagacagggtttttctgtgtagttttggagcctatcctggcactcgctctggagaccaggctttggcctcgaactcacagaaatccgcctgcccctgctgggattaaaggtgtacaccaccaacgcccatctgcttccaatcttttgagggcattgttttccagtatgtgtgcctgcatcccattttatcattcctactggagagaggatttaatcccactccctgccccagtgctctatggcttcaggggcagcttcacattctctctgctttaattatttgcaaattatttaaataatttgctatttaattttccttttcaaaataattaagatgttttttctatactctaatagcttaaaaagcaccatggttaacaagtaacaactgtagtggcagaattactgctatatgattttatgggtttgttgaaattccagtcttcctaagtcactgtcaagtgaattactttccagtgagcaatgaatgactcagctttggcatatttgcttgtgtaaagagttctagatgtgggctggagagatggctcaggggttaagagcactgcccggtcttccagaagtcctgagttcaattcccagcaaccacatggtggctcccaaccatctgtaatgtattctggtgccctcttctggactgcagggatacatactggcagaatataataaataaataaattaattaattaataaatcttaaaaaaaaaaagatatctagatgtgcctagcagtggtggtggcaggccagcataatgcctgaacctttcaggtggtacatgcctttgatcccagcacttggaaggcgagttcaagaccagcctgctctacaagagctatttccaggacagcctccaaagccacagagaaaccctgtctctaaaaaccaaaaaaaaaaaaaaaaaactgaaaaagaaagatccagtttaaaaaaaaaaaattctagatgttatgatgttagtttctgccatcgcagcagcagcttgcctctgtcaccaggtgccttacttagcattgtcagctatgtgacatgtgcattctttaaaagtgcctgtcaactggagcaacggtccactggagagatggctcagggattaagagcactgagtgttcttcctagagatcctgagttcaattcccagcaaccacatggtggctcacaaccaccttgaatgagatctggtgccctctgctggcatgcaggcggaagactgtatacataataaataaatacaatcttaaaaaataaataaataaatgaagtaggcatgactcactctctgtctctttacctctcctgcctctttgtctcttctttcttctctctcctcctctattctcttttgcttcttttcttttgtctgtctgcctctctcaagtccccactccaacatggtctttcactgtcccccttctccaagaaaccttttgcactaactctgctgcacatggagtgtttatttagcggtggcatgccttggcagggcacactgaaaagcagccactattgcccttttttctttttatctattctttttctttttctttcttttcttctttctttctttctttctttttttttttttttcaagacagggtttctctgtgtagctttggagcctatcttggcactctctctagaccaggctggcctcaaactcacagagatcctcctgcctctgcctcccgagtgctgggattaaaggcgtgcgccaccaatgcctgctttttatatatactttcacttcctttcagagactttactccaaattttaccatgtaaaaagggtgttttggtttggtgttttaatcacccccccccccagtgtgtgtgtgtgtgtgtgtgtgtgtgtgtgtgtgtgtgtgtgtgtgtgtagactaaattgttgtgtggcctggcttcaaagctttccagttcatgaaaacttcacgtctgagacgctcaagttgcaggcattacaggctgagccaccacatccagcttgctttgatttctttatcttagctgctttactgacaaattggccttggagagactagtggtaaagagtctggtagaaatacatctaagttttcattcactggggcctactttctcaaactacagttaaagttgtccaaaagtaccatttccggtgtttgtctatctgattattgatagactggtttttgaataattattttttatagttctggaggctaagaaaagcaaacatagggagttgacaggttctgtgtctggtgaggacacttttcctttttgtcacatgtcttctcaatgtactatcatataacagaaatacctggcatttactatgaatgcatgttcctgagctatagtttggaactgttggactggagtctctaagactgagaggcaaaaattctaatttagtcaagttgttcaggggaatctgcatacattaaaacccgaggacacctcacctaggaaattctctgttccaacccagtgtcctgtgcgttggtctttattgtatagcaaactaatctctgccatctattaataacaaggacaaccgaaaacagaaaatttgacagcactgggagagaacttcaacaactgtttcaagagacactggtatggagaagcacaattaaaaacaaaaacaaacaaacaaaaaaaccctacaattcctaaattaattatatggttctttttcttaaaaagagggaggttcagggcgacaattcagttggcaaagtgcctgccacataactattaggcccagagtttggatgcccggtgcctgtgtaaaaatccaggcacaggccacctacccacaacctacaggttcaaggccatatccaatttctctgcccagtcaggtcctatacctattgtcccatgatgttcaagggtacatcttctcctttccatgtaccctccccaactcccagatctagttcaggtcccacatccaatgccctgacctagtcaaagcagcccctctggcactacccctaaactccagtcttggaccagaacacccattcttgcctgccaacctagccctgtgtccaccagatttcaatccacctaaagcatgtctaactttcaactctaacctggctggcaaatcctgtgttctgtcatagcttgctgtgtccagatcaaacagagaactaacaaaagaaatacacatgacaggatctcgccaggcagtggtagcacatgcctttaatcccagcactcaggaggcagaggcaggaggatctctgtgagttcaaggccagcctggtctccatggagctgccaggataggctccataactacacagagaaaccctgtcttgaaaaaccaaaaccaaaaacaaaaaaaaaaaaaaaaagaaaagaaaagaaaaaccaaaatcaaaccaaaccaaaccaaaccaaaccaaaacaaaacaaaaaaacccataagctggctaaaatgggtcaagaagcaaacttagggctggagaaatgcctcagtggttaagagccctggctgctcttccaacagtcctgagttcactttcggacaatcacatggtgactcacaaccatcagtaagggaatctgatgccatcatttggcataaaggcatacatgcagatagagcactcacacataaagaaaacgaatcttaaaaaaaaaaaaaacaacaaaatccatctatctgttgtgtacaagaaactcagctttaaagacaggcaccactttaaaatgaaaggatggaaaaaaagtactgcaaagggaccaggaagcaaacaggaattgctatcctaatatataataaaacaaacttcaaattaaaactaatcagatgagacaaaggacacttcattataatagagacaacagttaaccaagaagacattactatactaaacatttatgcaccaaactccagtacacccaatttcataagtgtacttccagaattaaagatttggataaacaccagccctctaatagaagttgtcatagttattgtcctattgttatgaagagacaccagtgatcaaaggaactcttgtaaaagaaagtatttgattgggagcttgcttacagtttgagagggttagaccatgatcatcatggcaggatgtaggcaggcctggtgctgaaacagtagttgagagctacaccctgacccacaggcagcaaacacagagacagactagacctggcatgggccttttttttttttttcttgagacaagctttctctgtgtagctttgtaatccaggctgacctcgaactcacagagatcagcctgtctctgcctccccagtgttgggattaaagacaagcaccaccaccatctggtgggatttttaattaattatttattttggtttttcaagacagcatttctctgtagttttggagactgtcctggaactctctttgaagaccagactggcctcgaactcacagagatccgcctgcctctgcctccctagtgctgggatcaaaggcgtgtgccaccaacacctggcttctggtgggatttttaaacctcaaagcctaccttcagtggcattcttccaacaaggttatacctataccaacaagtccacacctcctaattcttctaatcctcctgaaacagttccactccctggtgaccaagcattcaaacatatgagcctataggggctattctcatacaaaccacctagtggttatttcaaagcaatcaacatattgatttctgcaatcaacagatcatgtggacaaaaaatagaaacatcagaattaaattatatcgtatatcaaatagacttaacagttatctacaaaatatttcccctaaacaccaagaaaaatataatctactctgcagcccatagagcccatagaagccactctaaaacagactatatcttgggatacaacccaaatctttcagattcagaaagatgtcaataacttcatataagtataatggacaacaatgcaataaaacttaaaatcaacagcaaataagtttctagtaagttcacaaactcatggagattaaacaattctgaatgacgaatgggccaaagaagaaatgaagtaagaaataaaaatcttcctggaaatcaatgtaaaagaaaatacaacacaatttctgggatacatgcctttaatcccagcacttgggaggcagaggcaggtggatctctgagtttgaggccagcctggtctacagagtgtttcaggacagccagggctacacatagaaaccctgtcttgagggggctggagagatgactcagaggttaagagcattggttgctcttccagaggtcatgaattcgattcccgcaatcacatggtggctcacaaccatctaaaaaataagatctggtgccctcttctggtgagcaggcaaacgtacaggtaaaacactatatgtaacaaaaaaaatctttaaaaaagaaagaaaccctgtcttgaaaacaaacaaacaaacaaacaaaagtcaagtgactcatttaaaaaaatagtggcacactcctttgatcccagactcgggagacagaggcaggcagatctctgtgagtttagaccagcctggtctacaagaactagttccaggacagcttccaaagccacagagaaacaatgtattgaaaaacaaaacaaaacaaaaatatattaggcttgagaactaaacagagaattctcaaaaaagaaagaagaaaagtagctaagaaatatttcaaattgtccatcacatctagcaattaggaagatgaaagccaaaacaaccttgggatttcatcaattcttttattgatctttaacattctgactggataaagatcaataaaagaattaacaacaaattgtagagaggatatgaggaaaagggaaccctcatttactattagtgatattgcaaactggttcagccattctggaaaccaatgtggagaatcctcgaaaagttaaaaataaatctaccatatgatcaatttacaatcacttcctggcatacacccaacagtcttggcatcctatcccacagacacttgctcaactatgttcatcacaatagctgggaaatggaaacaacctaaatggccttcaactgatgtatggataaaaaaaatgtggtacaaacatgataccaaatactattcagccttaagaaaaagaaaatctgcaggtaaatggatggaattagaaaagatcatattgaacgaagtaacccagcatcagttaaatgtctgatggtctcctcatgtgtggctcctaactacaaattttcagatgtgagtataacctgaggtaactgcagaaaccagtgaagtaaaaagaaccatgggggagttgggctttagtcagggatggaggccaatacagaaagagagggaagaagataaaataacagcaagcatatctaaaagagccacacagaatcatctattttttaatctaaaattatatttaatacatataagtctatctatacatacatacatacatacatacatacatacatacacacatacatacaaaatttaaataaaaaaattccttcacccaaacccataggatatccaacaaaaacccaaataccaggcataaaaggcctccagactcccaaaacattataggatgttttgttaccctttgttgcctcctagaggttgaagagtaaatccctactgctgaagatactatgcactccagacacccagaggatccaggctggaattgaactggaagtctcttccctgagaacttgctttcatgataccagaaagtgttatgcaaacttccaagggagagaaacaaacaatagtcccacccagctatgatgcctatgaactacaaaaattaccagcatggcatgatcatcctaagggtacacacagtagtggcattcatatcttggtggcaaccaaacaagtctagttggccttaaggcccctatcaacaagaaggaaatcatgcctggtactggaaacctagcaaattatccagggctagtgagatcagggatcttggaagagagcctacaacccctttactaaaccatcgtaattcctaacttcattctaaacattaatccttacacccacacataagcgtaatccccaccctcaccaaagaaaattctctttgcaacagatggagaccatttcagaaaactacaacccatcaaaatgcagagaacaagtaattatgtggtacctgaccccaactgatacatgtacaagataacttctggacctaacagtcagggaatactgaggaagaaaggacagaaggattttgtaagggccagaggaacaggatctgtgctgtgagattttttgttccctggaaatgacagggatgctacatccatgcgttctcaacaacatggctgcctgaacaagaccagaacaaggattatgacaatagctcacagggccccaatcctagacaaagactacagacaactaaggagtgctgagagagggagaaacagctttctccaagtgtcagccctgaaatatatgtgcaggtaacatggtataaactgagcgggttgtatacacacatcaaacatcaacagttgaagaaaaagaggccacggcagaaagccgttggcgaagctggagggaggatagggaaggggaaatgatgtggttacattttaattcaaaaagtaaaactattttagaaaaaagtcaggcatagtggtctatgcctttaattctaatgctggagaagtacagtcagaaggattcataagaatttctggccagctagcctaatgaactccaggttctaggtacagtaagagaccctatctcaaaaaatcaaaaaaggggccgagagttggtggcgcatgcctttaatcccagcactcgggaggcagaggcaggcagatctctgtgagttcgaggccagcctggtctccagagcgagtgccaggataggctctaaagatacacagagaaaccttgtctcgaaaaaccaaaccaaaccaaaacaacaacaacaacaaaaacacaaaaaaggtagagtggaatagaagacacccactactaacctctggccttcacacataaatgcatacaaatgtacacatgcctgcatacacacataaaaataaaataaaaagaaagcccagaacctccttgattaatactatgtattaattgtctattgcacacctattgtagaccagatactgtattttgtattgccatagattaaatagagatatccagtgataaaaacattgtatattcactctattctattctgcaagacctagttgaattttggacttctggggaggagcatgtgtgatttgtaaaaaagcccgtgatttgatgtcttaaggcccccaatgcaagacaattccttatgatttgttaaatgacaacattatcaggtccagcagacacaggaaaaggaaataagcagcaacatatattttgatgacgtataccgtcatatgagcccccatctctccccatgcttaaactggaagcattatctcatatttctacttaacaacccactatcattgccttactcttcgctgttgttgtgtatgtagtcaaggatctgactttatttgaggggcggtatccatgatagtgatagttaatactgtcaacttggcaagaatctagaatcaccggagacaaaccactgggcacacatgtgagagattctctcgactaggttaattgatagactcatctctgtgcgggaagtccagatgttggctcaaatataaggaagtcctggggatttgctttcggcttgcttgcctttgcatgtggatgtgagctcatctgctctgcttctgccgctgccatctttcactgatagcagatccagatccttgaagtggactaaagactagtggtagctctccagggacccttaaagcttttgctgtcaggttgggactgctgaggaatctagcctcaaggaatgcgcagctatcaggacagccatggttgggccattcagactgtattgtgtcaatcaatctaaaacaaacaaacaagcacccaaacaaaaaataagaacaaccgccttttgatatctatgcatcacctctattctgttctcctagagaacccaatgcagccccctcccctcccagacagggtttctttctttcttcttttttttttttaagattttatttatttatttatttatttatttattatgtatacaacattctgcttccatgtatatctgcacaccagaagagggcaccagatctcattactgatggttgtgagccaccatgtggttgctgggaattgaactctggacctctggaagagcagtcagtgctcttatcctctgagccatctctccagccccagggtttctttatatagtcctggccgccctggaacgaactctctttagaccaggctggcctcgaactcagagattctcctgcctctgactccctagtgctgggattaaaggtgtgtgccattaccgccctgctcccagtatagttctttaacaagtaacttctcaggctcgacagcactgctgggctgtctccccacagctattgacaagaccgtttgctaattgaacaaatttctgcacatggagacagtctccttccttagacacccaatgctggaaaaacaggcatgggacaccaagcccagcttgactgcagaattccttagccaccataaaagataatcctttaaacagagcgacacaacctgcctcctccaggaatataatgttttaggaagtctgtcttattccttcatagtcccactgcctttgtctgaagtgatgttcttttttttttttttttttccttccttttatttagggcagtgtctactatttttcattccttggcagtatatgcagtcagaaggggttggttttcagatatggttctttggggccttggtgtcatgtccctcactttgcaagaggaagggggtaaaagaaaagtcatcaacatgcaaaacctgtcaccagatgccctattctgacccaactgccagacctgcctggtccgcctggctgctcatgcgttcagcggattctcaggcgccacctccaggtttcagtacagagatcggggaggtgggtgagctcaccctagaaaccgaaaggcaggtggcgaggccatgcgcgtctgcgcagcagcaatggggacttgcagagggtagtggaagtttatcaaaccagggaaacgtctctttctttgccttctgcaaaaggctccggcgcacacagctccacagcagcgcagggctttcgtgtgtcaagcgccttccccaattcagtttctgagtctccgaagctcaactcggagcctttggggagcgtcaagtacatcctatccacctttctgaacgcatgggcacaacaggcattaggtgtaagtagacgggaaaagcagatcgcccggcgctgcgtctccacgcctgaagcttgaactgcagcgctcggcatgaatcgcgcatgctccgtgtgcatgcggggcggggctccggccggaagcgttctctcccaggcggcatttctttcctgtgcgaggccggctagggctcctatcgcctctggtcctgcccctggtgagtagcgggttcccgcggggccgggccaggtgcgtcccccatccctccgggtccccgagggcctggcgctcacctggggagcccagccggacagtcacctgcccctcacccgtcacacgtgagcgccggcccggccctgccgatccagaggattaacctccaagggcgtccggggcctcgccttggcgcccggcccggcgcgagccctcaggtctcggcgctggcgggagactggggccgcacgcaaggacatctccgtaggcggcctggtggtcactggaggattgggcgctctgggcgacctcgggaccaggctcgtgggaaggcggctggaaggaacctgcccgctcgtgccggccgcgctcctccctctttgtgcaaaggcggagcgggtgtttcttcaggactggccatgctctcccagaagatgctaatgttaagttagtcatgacctgtcctctgcgcagaacctggcaggcgttcattgtcacacaggctgcgtctgtagggcctcgatagagacaggaccaggacttttgagttagttgaaagaccctacgtagaataccgcagtgacttaggaagaaaatactgcagtctaataaacgttagtaataagttactcaaagataacggtatccacactgaaactagagcttaaaatgaaacgatttaaaatggtatttgtctaaagataataatgaatcatatcggttttgtggttgtatgcagcaatgtgtattttttttttgccaaaattaatgtttatgcaaaatttaaatacattctctctgttggctgcttttatcgtacactttcgtaatgataaggaactgtaatagtcttattttgcaaagatattaatgctttgtgaatgatagaatggtgtgtgtctcatctatggagactgtataaaaatatttccgtgtactgtctgcaatcaggacgtttcagtttcgtttcaggattttgaagtcacttaggaaggtggacatgcagtactcttaaatctgccttgaatcaccgttaatactggaataggaagaattgtctcttggcactgtcttgatgactttaaggaactgccctttggaaacagcccatagccctgatttacctttgtaattcagtgactacccagtagatggcaattttaacacaccaacctaaacttttttttttttttttggaggcagggatgttttgtgtaatttaggttaatcttaaaccctttgcagcccaggttagccttgaaccttaaatcttccttgtagtctcttgagtgatgagattcccaggcttttgccactgtacccagctctgaccaagacttttaaaaaaacaaaaactttattggaatgttgtgacttttcacagattaagttaacaaggcctttatctcccttactggattattatcaactgtgtttgcagctttattgggataaagacaaaagaagtaaaatttccatgccctttgagaagttgactgtcaagtatcctagttttgaaatccctactaatggataatactatgaatactaatccgtactgtgattttgctacatgaggcagttataatttggtgacagttccatttttctttagtaattaatataattggacagtaatttttgagtaattatatattagccattgttacatatcaaatataggggccacttttttgtagatgtttggtaagttcttattgaatgaactagttagcatcctaaacctaagtttctttatccaaaatgagggctttcagttacttgtttaaataattattgtgataggaatggcacctaatagagaagtgtgaacactgagttggaaatgctttagaaatctgacattgctgttggatgactgaaagaattgggaggttttctctacagctataaacaaatactagagctagtccagagaaagccaatgagaagcattttagcttagcagtagtaagaaaagtgttagagctagaagaaacatgaatattagtctttgcaatacctacttggcacctaccactgagcagtctagatctggtttatttacttatacatgagttaatatgtattttttttttcttctccccttcccccagcacttgccaaggcttaatgacactgttggacactgatatcctatcctaaaatgtgatagtcacatgcttcctgctaagcttattttgtgaaggtactgcctttgacactggagtgaattcctgttgtaaacctgattgttgtagttgctcagagatgtaccatatttaaaagtagtctcatcaactccctttcctctgttcgtggttgtattcttttgttagtaataatgtcttttttttttttttttcctttttcttcaagacaagggtttctctgaaacagctctggccgtcctggaacttgttttgtagaccaggttggcctcagactcacacagattgacatgtctttgtctcccagatgcctggctgtgatgggtcttctcatgtaacacattgtttgttgagcccaggctgtcctacaactcattgtgtactccagacagtctcttactcatggcaatgcgtctcagccttacaagtacagggaatacgtgtgtgagccatgtccagctcctcctcttgttttcctgtcacttgcagttaagttatcctttcctgttgcctgtcacccttccctttagagtagtggttctcaaccttcctagtactgtgaccctttaatacagttcttgttgtggtgacccccccatcataaaattacttggttgctacttcatagctgattttgctactgttatgagttgtaatgtgtatctgatatgcaggatgtctgctatgtggcccctaaaaaggtctcgacccataggttgaaactgatgctttagaccttttcctttactcccattgtcccctttgtgctttcattccctatatttatgcatgtggctatttctaaatttaaagttatttgtgtgtgtgtgtgtgtgtgtgtgtgtgtgtgtgtgtgtgtgtgtgtgagtgtgtgtgttttcttcttttctgagacagctctggctgttctggaactcaccattattaccactggcccaaaatttaaatttagatttctaggagaacatgcagtattagtctttctgatcctgcttatttacttaccataatgatctccagttttcattaactttcctaaaaatgtgataatttcttctttctagcttactaataccccattatgtaccacactttctttccatttatctgttgatgaacattgaagctagttgtatatcttgtctattgtgagtagtttagcaaaaagcaatattgtgcaagtaactcctggcatgcttacaattctttgggcatgtggtatagtcagtcttcatactgatctctgtagtggttgcagcaactcttatacccactagtattgtatagctaagattcctgcctcctcacatcctcactagcatttgctttttgttttattaatcgtagccattctgactgaggcctgatggaatgtcaaggcaattttaatttgcatttccctggtggctaaaagtggttgaacactcttaagtatttattgttcatttgtattcattcctttgataactgtctgttcaactcattagactatcacttagtgattatgtgttacatgtgtgtttttaagtttttaaatgctttatatattctaaatattaatcacttgccagatgtatagtttgctgtagtcactttcttgtcccaccagctcacaagtaactacatggagacttatgaaagttcagcttttagcttaggcttgtcttactagttcttacaacttaaattaacctgtttctactaatctacattctgtaatgttgctttttacttctccttaattctgtatgtcagattccctctgctttctcttccctccagtccccccaccatctcgtttgtctctcctgcctagctattggctgttcagctttttaatacaccaattacagcagtacatcttcacagtgtacaattatccaccacagtttgtgatctcacccccacccccccccagcaaatagtgtaagctaatgacgaaatttaggatcttgcacttgctaggctaaacccccagacctccaaattgtaattttcttggtttgaaatttttgaaagttctcttccttcatatttactttgttgttggaagcaaaggatggttcaaagaatttaatgttacttatcaattaagaaactgcatatttctatctgtgataagagtttaaggccatcctggtctacagagctagttctaagacaactgaggctatactgagaaaccgcttatctcatgaaacaaaaaaacaaaaacagcctttaatcccagcactcgggaggcagaggccagattggtcttcaaagagagttccaggacagtctccaaacctacaaacaaaaacaaagtaaaaaaaaaaattgcatacttaaatttgagctgtttttaaaaacctgaagcataagtatgcgagacaaaggagtgagtttttagttagatttcagtctcaaaaacaaatgagttggttatttgttatacataatagtattcttcttacaactaaacctgattctaatcttcagtttctaagggaagctttaatgtgtttgtttacttaacatttaaaaatctcagtggggcagtggtaatcccagcatttgggaggacagcctggtctacagagtgagttccaggacagccagagctacacagagaaaccctgtctcaaaaaacaaaaaaagatggttctccttcaaatgagatgcttaaacaataagcaatgttttattttgaccagaagtttctttatctactttctctcccgattttaacaagtactggtatttcctagtgacttttctctctctcttttttaaggttaacagtcaagatggtacatgctgaagctttttctcgtccattgagtcggaacgaagttgttggtttaattttccgtttaacaatatttggtgcagtaacatatttcactatcaaatggatggtagatgcaattgatccaaccagaaagcagaaagtagaagctcagaaacaggtacgattgcagggtataaaggtcatgtctcctatgccagcagatatttttttatccaagctaagattataaatacaaaactcatgtaaaaattcattgatccatcttttcagtattaaccctaaaagtcttttttactctgtaaacaaacatcagaagaaaaatgattaatggaaatataggttcttttttgttgttcttgttgtttttttcttgtctgcactgctttgttttttcttcttttattgaaaatagatttttttcacataatatatcctgattgcagttttcctctctacttctcccaattcctacccacctcctctcctatctgattcgatccctttctgtctcattagaaaacaaacaggctgcatggtgggctggagagatggctcagcggttaagagcactggctgctcttccagaggaccggggttccattcccagcacccatgtggtagctcacaactctctgtagctccagttctaggggatctgacaccttcacaccaatgcacataaaataaatttaaattattaaaaaaagaaaacaaacgggattctaagagataataataaaataaaataacacaaaaattaactggacaaaacaaacagaaggaaaagagcccaagagaagacacaagaatcagagacccacttgctcatatactcaggaatccctaaaaacactaaactcgaagccataataatatatatgcagagaacttggtgcagacctgtgcaggcctcagtctctgagttcatatgagttgtgatggagttgttttagagcagcagttagcaatctgtgcttctctatctgtggggttgcacggtcacatatcagacatcctgcatatcatatatttacattacaattcataacaatagcaaaattgcagttgtaaagtagcaacaaaataattttatggttaagggtcaccaccacctgaggtactgtattaaagggtcacagcatttagagggcttgttgtcttggtatcttccatcccctctggctcttaagtgctttctgtcttctcttccacagcattccttgtaccctgaggagatggattttatggagctatcccattagggctgagtgttccaaggtctctcactctgcatactgtctggctgtgggtctctgtatttgttcccatctgctgtaggaggaaagcagcttgttaggagtcattttattgctaggtggttttgtttgtttgttaagaacagtagtatttatatttacccttggtccctgggctgtctagtgtcatgttcttggtcacccaagccccaagcaatgttgggtatgggttccatcttggggaatgggccttaagtcaaatcagctgtatgttagttactcccataagctttgtactgccattgccatagctttagggcccagcatagcttgcacacaggataccattgtagatcagggtttgtggctgggttggggtttatgttcctcatttggtagcatgcttagtaccttctgtaccagagatactagaatgtagtcaccagcttaatctccatgttcagtgagtcatgtaagtgttatcttcagcaatggagcctttctgtcagtttgtgggaacaacctatagtcttggcaacagcatggattgtttagggattcccatggggcccctttgactaactattccattagatgtaatcaaatcctggtattggaagcttaatttgtaacatgatgtttaattggggctttgtttcccccattatttggcaattttatttagatcaccttcatatgtgcatatattttagtaagtttctgctgtgctaggttttaatactatctctcaatggctattaattttaggtgcttctccctgtatttcctcccttttccatcttctcttgatcctcccagcccccatactccaaatctatccatcactatctagttgatatttcccctttttagggagatctatcttgtttcaccagtacttaatacctagctgtgggtctatggattgtagcatgtttatcattgacttaacagctaatatccacatataagtgaatatattatcatatttgtctttgtgggtcgggaatactttactcaggatgattttttttttttaagcttcatctatttgcctgcaaattgcatgatttcttttcgttccttcttttcttccctccttccttccttcgctttttaaatggctgagtaataactccattgtgaaaatgtaccacattttacttattcttcttttgagggatatctaagttgtttccaatttctggctattatgaatagagcaggtgggttggagagatagctcagcggttaagagcggctgctcttccagagatcctgatttctcagtaaccactatccataatgtgatctggcgcccttttctggcttgcatggcagatagaacactgtatataaatcttacaaaaaaatgaatagatcatcagtgaacatggttgagcacctgtccttgtgggaggatggaatatcctttgagtatatgcctaagagtggcataactggctcttgagatagattgattctgcttttcctgaaggaactatcttacttattcccacagtggctgtgtaagtttctactcccaccagcaatgaatgagcgttccctttattccatattgtcaccagtataagttttcccttgttttattgatcttagtaattttggtttacatttccttcatggctaagggtgttgaacttttaagtgtttctcagccatttgagtttcctcttttgagaattctgcttagatctgtacccccactttttaaactggattacttgttctctcttttgtttgtttgtttgtttttgtttttcgagacagggtttctctgtaacagctctgatgtcctggaactcactttttaaaccaggacggcatgaactaactcagagaaccatctatctacctcttgagtgctgggactaatggtgtgtgccaccaccacctaccatattttctttccttttttaaaaaatatgtatttattatgtgtgcaatgttcagtctgcatgtttgcctgcatgccaaaagaggaaccagatctcattatagatggtttgagccaccatgtggttgctgggaattgaactcagggcctctggaagaccagctaatgttcttaatcactgaaccatctctccatttaatccatttagagtttgagttttgtgcagggtgataagtatgtttgcattcatctatattcagacattaagtttgaccagtaccatttgtgaaggatgctgtctttttttctagtgtgtatttctggtttctttgtcaaaaatcaggtgtccataggtatatggatttatgtctgggtcttcagttcaattccattggttaatgtgtcttgtttttgtgccaataccatgctgcttttattactatagcagtgtagtacaatttgaaattggggttggtgatacctccagcagttctattgatagttctagctatcctgggtttttgtgttttcatatggagctgaaaattgttcttttaatatctgtggaggattgtattggaattttgatggggattgcattgactctgcagattgcctttggtaggatggccatttttattacattaaacctactggcccatgagcatgggagatctttctgttttcttcagtgtcttaaagtttttaattatatacgtctttcacttgcctggttaaagctacctgaagatgaaaatacatttggtttttaaaatatatatccttattggaacatttttatcagaaacatgatagaaataatctagatgaaaatctgtaacagagcaaacataaatatttttggcaacaatgtacatgctttgtatggcatttaaatttgtaaacacaagttgtcagtcttagacttggtacaccacccaaaattcttaggaaatagctaaaaaatgttactggtaataaattgatttgaattttgactgtttttctgctactgtctcttatgaccatttctttcttttcttttttcccccttttttgattttcgagacagagtttctctgtagctttggaacctatcctagaactcactctgtagaccagactggcctggaactcacagagatcctcctgcctctgtatcccaagtgctgggattaaaagtatgcaccaccactgcccagccaccatttttttttttttttaattaactgggttgatacctagctctttactaggtgatttctgtttatctgtaagatctaaaagtctattgaggataagatgcttatattcttggcttcttaggtttattttgtgagttgtgactctgattctttttcttttttttttttttggtttttttgagacagggtttctctgtggctttggagactctgattcttttaatgaacatttaaaggagatggcatttgctttttcaaatgctatagacaggcatgggaagcagatataaacaaatagctgttttttgcatattatgcatcattcttaaccagtaagaagtaaaaatcacagtttcataaatatcatagtaaatatgtctctgaaaaaagtttggacatttgtaaatttattgcctgaatttgattataaaataactagcgagttcaaggccagcctggtctacagagtgagttccaggacagcctccgaaacagtacagagaaaccctgtcttgaaaaaccaaaaaaaaaaaaaaaataataataataattggagagaagtctagcttgcattgtcagcctattttcatttcttttttcttttcctttttgtttttcaagacagggtttctcttggaccctgtcctggaactcactctgtagaccaggctggcttcgaactcacagagatctgcctgcctctgcctccctagtgctgggattaaaggtgtgccccaccaatgcccagttattttcattattttaacactgatatgtttgatcaatatagggcttttttgttttgggcttgccaacaacagaaatttttttctcacagtttttaatacttgaagtttgaaattaaggagccagcatagttgagcttttgtgaggaccttcttctgggtacaatatgggggttgttttgtttgaagtttttcgagacatgtagccctggttggcctggaactcactgtgtaaaccatgctggcctggagtacatagatatcttccttcctcccaaatactgagattaaagctgtatgccaacatgctgggctgctatattgccaaattaaatttaaaagaaataaatttcattgtgtacctgaatgtaacaatgtaactctttccccatcccacacacctcttcccccccccctccaatcatggaaattggtttaactctcaggttaggatttgttaaatttttatcattttagcattttttggtaacagggcttttcatttcattgtatttttaaatttatttttatttgtgcaagtaagattatttatcacatgaatataggtgcctgtggtagtcagaagagtgagcagattccctagaactggagtcaacaggcagttgttagccatggtgtgggtgctgagaactaacttaggtccactggatgagcagtggcatttttttttttttttttttttttgtttttgaagacagggtttctctgtgtggctttggagcctatcctggcacttgccctggagaccaggctggcctcgaactcacagaaatccacctgcctctgcctcccaagtgctgggattaaaggcgtgcaccaccaacgcccggcgagcagtggcattcttgactgctcagtcatctctccagctccagggcttttagatgaagattttgtccttttttttttttttttctatgaactcctgaaatactcgtgtagaagacactatatgaatgggttattataattaagacttacttgaaaactatatatatatatatatatatgtatatttatatatatatatataatttataatatatattgtgctaaaataactgctatgtgaagtgtcatgttttcattgtacacatggtaggtaagaaagaaaaaaactaagcaaaaaaaaaaatctcatccctgttaatattagttgaagtagtaagcagttcatgttagttgcttgatgagcagtgaagacatactggcttttagagtaagggtcaccagtgattgaggcaattgagtgtgacttcatgagagaggctggtaaaatggaacagcaatacggagtcaggtctagatataagtgtggtttatttaggaagatgctacacactcagatcagcctggccagtcggcagggagcaaggtaagtagaagggaccccatgtgcgtgtacctcactcttaagccttcccccacctcactctaaaccttccccacggcaccctgaccacgcccaagtggccgtggccaggcaacctgtctccagccccaagtgggcgtggttagggtatcccctacaggttggtcacaagaataggaaaggaaaaggttaaatagaaagaacatgaatcaagtcataaggcagtaagaatgacaagaccagagaagaaatactaagtagtctagttaggttggagaggagattttatgtagttgactgtagtgggacctaaaggggaaggtaaggtaaggactgctttattaaatcagggaacatagttctatgctttttttcttcattccctttcttttttggtgagtggattgaggctctcagcagaagccagagcagttgagaagcccatcattaactgatgcttctaggattattctgttcccatagtaacttcattttattattattatttttaaagattttatttattatgtatacaacattctgcttccatgtatatctgcacaccagatggttgtgagccaccatgtggttgctgaaaattgaacacaggacctctggaagaataccaagtgctcttaatctctaatccatctctccagcccccataatagtattttagatatcacagtgaaaacatgatgggatttgcttggccaagagctgtagttttcctgcattcccttcctacttttcttcctatgttccaggctagctctagaaataacattgttgaccagttaaagacatacataggtaatggtaaaccatgaactatattaaatatatttaaattgttggataatatgcaatgcagtgtttttaggatgattcaccttacagtggtatataacaagaattggaagtaggacaggctagaaacaagaactttatagatgacaataatcctggcaaagagctagaataagagttacaaagctgggtggtggtggcacacacttttttttttttttttaaagattttatttatttgtttgtttatttatttatttatgtatgcgacattctgcttccatatatatctgcacaccagaagagggcaccagatctcataacaaatggttgtaagccaccatgtggttgctgggaattgaactcaggacctctggaagagcagtcagtgctcttaacctctgagccatctctccagccccctggcacacacctttaaatccagcatttgggaggcagaggcaggttggatctcttgttcaaggtcagcctggcatgtagagtgagttccagactgtcagggctacacagagaaactgtctcaaaaaacacacaagtgaaaagtgtggcaaaaggaatggactgggtaaaattgatttgagagtgagtgctggaaggactttgtgatgatgtaggaaaagaaaatacaacttactcttttatgctgtatagattctctaccagtgcactataccccacctggtaatttgaatgagaatggccccatatactcatgtttgaatacttggtcccaattggtggaattgtttgggaaggattaggaggtgtttccttgttggaggaggtgtgtcactgccttgtggttgtggattgagatgtaagctctcagcttacatcatgcctttgctctatcactatagattttctcaaactgtaatcccaaattaaacactttgttttattaggtgccttggtcattatgtcttatcacaacaatagaaaagtaactaagcagtcctcaagtggctttacattagctgccaactcatatagtactatagtactatcaaaggagagagaaaaagtacactaatcaaaagaacactcttgtgaggtgtttgacttgggctccttgttaattgtttaaatatgctgcttattggtgtttcttctatgtacacttatattggagcgctgtgctgtggtctcagtgggaggatcagaggatgttcttgtctttaacctcagtttaacagtttgtctgttttttcactcctaatgtcatatgtacttttctaaacttagccttgtaggacagtgatcttctgaatctggtgaagagcaagtgtgttatctcatgatagttcctttcctgcttttcttttcctctactttcctccccaggcaaaaatagcagtatttcaagccctactactactacttttaaaataatagtgctttatgtaaaaggaaagaaggaaaccatgaaaatgcaatgaaatggtataaaggataaaaaatagtatggaacagttaagtatgtacaggtcactttcccttttttccattttacttgtcttgccttgtattctccatcattagtttctttccagcgaaaactgctgtctgatgaggccttctttacaaagcagataaaatgtgattgctgttgaggtgtaaaagataagacagtatacaaactgttttttacctaggcatttttgtttttctattttaagcatcgtagaattatgataaattattgtctttttaaaaaaagatttatttattatgtatacagtgttctgcctacatgtagggcctgcaggtcagagggggcacagatctcattacagatggttgtgagccaccatgtggttgctgagaattgaactcaggacctctggaagagcaggcagtgctcttatcctctgaactatctcttcagccctaaattattgtcttaatcagtgctaaaatagatacctttaacagctgacacaaagctttatttataaagtgaaagagaaagtatgcatgttcaagagataaagcagggggctaaagagatggctcaatgtttaagacaagtggttgcttttccattacggcggcttacaaccgtctttaatccagctccaagtgaattgacacacacagacatacatgcaggtaaaacaccaatgtacattaagaaacaaaaaaagatgaacctggaaaagactattttgtccattgatgattttacagtggataggtaaattggtttcttgtgtggatcccagtgttgttgataacatttgtttgaaacctaggaaataacatgtttctccttatgagccaagaaagtctataaataaatgctctgtgataggaattcctggtagccgtatccctgacaagcagcgagattaaaggcattttagaaaaacaaaagttcaaaaatggtaactctttttaaatgttgtttactggagtttctgaacatttctaaaatgttcacttaaatgaaacttgagtctgttagctgtagagttgaagactagtgatgacaaactcccatgttcgagggagaaaccaagcaaaaaaaaccaagctaactctctgatcaggtgattagagtgtaagctgcagagttggtggcttgaattcagctcctgtccctcgaatttcctgacttttcacccagagcaaattttttaaaaagatttatttatttattatgtatgcagtgttctgtctgcatgaatctctgcaggccagaagagggcaccagatctcattaagatggttgtgagccaccatgtggttgctgggaattcagctcaggacctctggaagagcagtcagtgatcttaacctctgagccatctctccagccccctccagagcaaattcttattactaatatttttacatttatttagagtgtttgtaggtgtgcgtgtgcaggggagtgtcacgagtatggcacacatgtggaggtcagaggacaacttggaggaaatcatattttccaccttgtgggttccaggattgaactgaggtggtcagacatggtggcaagagcacttacttgctgacctgtcttatcagctctctggcaaattacttaatcgagataaactttggtttattcacgataagagaaaaaaaaagtcatacctcctgagatctttctaagttctattttttttgtattttggcatgtttgacacaatcagaaagtgttcaccattgttttaattttaactgaaaacttggcattgctagaacttaagatgtcaagctattttgccttactttaagattatacatgtatgttattttgagttattttttattgttatcagttacctgtatctttgttgttaaaaggacatcatctcttctccagagcgagtgccaggataggctccaaagctacacagagaaaccctgtcttgaaaaacaaaaacaaaacaaaacaaaaaaggacagcatctcaaaacaacttaaaagtacatatgtggggctggagagatggctcagcagttgagcatgttgctctttcagagatcccgagttcaaatcccagcaacaacatggtggctcacaaccatctataagtgggatatgatgccctcttctagtgtaaagtcatacatacaggtagagcactcattgacagcttacctgtgcctgtcatcatatccttctgggaaagaaaaataaataaactaccctgaggtcttttgggagccaagggagttcaatgtgtcctactctcttcctcctcccctccctctcttccttctctttctcctcctcccccccctttgagactggtaccatgtaacccaggatgaccttgaacttgcttggtagcagaaccttctgcatcagtcatggtattacagacattactgtgcccagctctcactcattccttagcctcctaagttcttgagattttgcctgacatcatgcctgctcagctttcatttcccaaaagctggttacattttcttgacttcagtaaagtggcccctcagttttattttgaacccaaaattcacaaggagcctacagtatcccttgaaaagtattatgtcttctgttcattgctgttcagaattcttcatctgttttgaagtagcagtgtctaaatataaaaggtggtttggttttttttttctttctaggcagaaaaactgatgaagcaaattggtgtgaagaacgtgaaactttcagaatatgaaatgagtattgctgctcatctagtagaccctctgaatatgcatgtatgtatctttattcttacttgcctttgacttgctttttggtcttacagtctgagttaaagatctagaagaccatgactaatttcaatgggtctctaagagatgtcaagagtgacgtagcatgttgcacacacacatgtggctcattgcacaaattagacacaagacaggacagcaatagaaaaatggaatggaacagagcctggagaaagccaggcacacttttctaagagggctttccattattgtatcaagctgtgactacatgtgccatgtgaccaccagaaaagttactggagacaattcagtgttttcactaggccctgttcatatagactccttttccatatgtatatcaaaattctgtactcctacaaggaaaagaattttattcttttttatttatttattaaaagaatttattctccataaaccatattgttaatacagtttgggaacagtgagctgtttttatcaaggaatgataggaaattttcccaaatataagtttccagatagtaggcaaggatcaccctgttaaagatgctgtcaagcctgttgtgttatctctgcacacaaaggattagtgaaacgtatatagtatatgaaacttctttaatcatacggcctttgctcttcctatatccaaagcatatgggtctggctgagtctagctagccagcttttccccagaagcctctgtgttctaactgctaggattacaggtggctgctgtgcctaccggcctttatgggattctaggaatctgaactcctgttcttatgcatatatggcaagtattttttcctgtcatcttccccagctcaacagttgtacttttcatgagtaaaaattgcaagttcaatttggtgggtatacattctatttctataatgaatttctgttgttttacaatgtaattacattttttggtttttacaagaccgtgtttctttgtggctttggtttttttttcagactgtgtaacagtcctggctgtcctggaattcacttttgtagaccaggctggccttgaactcacaaagatccaccagtctctgcctccctagaggcctgcatcaccatcacctggctgttttcagtatttatttatttatttatttactatatcgtagtgtttctttttcatgagtggaatgagtttaccttattcagtcctgaaaggctttgtatatgtgtggtttttgtttttctattgctggaattgaaccctgcagcagagcccccagccttgggtgttttttttttcccagtaatagcaaattgttaaattctctccttttttgtttattaatttagttacccccttgaaaagtttttttttttattcatttttatctataactttaagcctatttacatgtaattatcaaattataaaatagtttgccattgggagggtatatgtatttgtgtatgttaccacgtatacaagttgtgaaattcatgttgactttaacttttgccaggttacttggagtgatatagcaggtttagatgatgtcattacagatctgaaagacacagtcattttacctatcaaaaagaagcatttgtttgagaattccaggcttctgcagcctccaaaaggtatggttagtttatgtatttgcctaagcattaagaggctggaaaacactgaaaagttttgactttagagactgtttccatgaagtgagattcttagtagaatgctgagatgcagtgaattgttttataaagaattttaaaatattcatccattcttccacttcaaaaattttggtgaattctacttcttataatacaactgtataatcctttatttgaaatacttgtctactacatgttagtaaattgaaatttgggaaattatgtttaaagtatttcaaaaatcacaaatttttttttttggtttgttttcaagcaaagccagaactttgttggttcacaattccagtgattttatttttttcttttagtgatctgtttttagatgatagtgcttcttacagcgtttgtaagaatgagctggaaataattggactttatattaacattaagtacgactctaaagcagcttcttcatttgtagtttcactttgggaactgcatcacttacggagttgaaaatgcttctgactacatcttcaaatccttctacttttattcttgcaaaccttagttatgcttaagccttgttaaaggtaactcaaataatatgacaagataattttcagaaaggaaagttgagttgggcatggtgactcatgcttgttatcccagcacttggggggtgacacaggagggttttgaagttacggctagactgggctacagagctagataggatcacaaaaaataaagcagaaatttaagttagctactaataaggtagtatatttgttgctactgaagatcatctcaaatttggatttatttatttatacatgtgttattccttaatgtcaatcttttagttacttagaacacttaactatgcaaagcctttataaaaaatgcccatcttgcccatcttagttgatcctatgtaagcatagctagatgccaccatgttaccagagagggagactgtctgggggaaaaggcacaaagattaatctttaaagggagtataaatttgtaaactttttttgatttttgtttttcgagacagagtttctctgtagctttggagtctgtcctgacacttgctctgtagaccaggctggccttgaactcacagagatccacctgcctctgcctcccaagtgctgggtgggattaaaatcatgtaccaccaacgctcagcccgaatttttaagcttttataaaacaacattttttgatttgttgcatctgttaatagaagtatccaattagttcaggaaatctgaaaagtttgcttgcaaaactgtttattactcatcatacatattgacgccatggagaccacttgagcaaaaagatagagaagaaatactactttgaatagccttgtgagattcattgctaatgtgaggagtgttgggcaaacagcatccatacaggaatagagagtagaagtactatgtttattaccatgtaaactaaagaaaagtctgttgttttcataagggtattaatgaaataatgttgttttacaggtgttcttctgtatggacctccaggctgtgggaaaacgttaattgccaaagctacagccaaagaagcaggctgtcgatttattaaccttcagccttcgacactgactgataagtggtatggagaatctcagaaactggctgctgctgttttctcccttgctataaagctgcagccttccatcatatttatagatgaaataggtatgctattttctgtgtgagcatcctaagtcatttaaagatgctatgtagagaaccagatttaattttagtacttatctacgtctgtgataaaccagaagatttttttaagacttatttattcatgtattttatgtatatgagtgctttgtctttatgtacaccagaagagggaatcagatcccattacggttggttgtgagccatcatgtggttgctgataattgaactcaggacctccggaagaatagtctagcgctcttaactgctgagccattttctagccctaaaatttgttctttttaaagaatttgtatgggtgagtatgccattgcacatatatagaagtcagcttggtagaattggttcttctacaattacacaggacaagaagatcaaactcaagccacaaggcttatgcaggtatagcctttacctctgagctatcttgctagtctcaaaatatatattctaaaataccatgtataatttccatgatgtaaaatggaccataagtttgtttactccattatttgattgctagatgtcttttctcaatttcaaatagtgcatatgttgtagacatacccatgtatgcatgattatctatggtaaatacctagaagcttgggattacctgttcttgaaaatgttgcactaatctggtagagcgtggagtatatgccatatgcctgccatcctagcattgaagaagctaatagaaggatagagagttccagaccagtgtttgggaatgaacactggttgcctagtttgtacaaaatcttggagtcccaacatcataaacaaaaactgggcctgttagcacacatgtggttttagcattttggagatagagtcagatgattaaaagtttaaggttatttgtagctattacatagtgagttcaaggccacattgatctacatgagactgtcataaaacaaaatctaggagaaaaaaaagaaactgtctttttcttttttattctttttcctttagaaatattgtgaggtagaaatttaattttattctttctcatttgggtaaacaacctattttgccttctatgtcctgaattttagtgaactctaaaatttgtggcacatcagtatttctgtttttggtaaaatatattattatgagagctgtagagatggcccactgtttaagagcacttgctattccttcagaggacctgaatttggttcccagcacccgtgttaggtggctcacaactgtctaacctccagatacagggaacccaacaccctcttctggccttcataggtacctacaatgtggcatatacacatacagatactcataaataaaaaattacacatttacacataaatcttaaatttttttttaaattaaaatatgtctccctcctcccctcccacagggtttctctatgtaatagtccttgatgtcctggaactcattttgtagaccaggttggcttcaaactaagaagcagatgtatctctgtgagtttgaggctagcctggtctacagagcaagttccaggacaaaccttgaaagttaccattctattgccttagcttctcatgttctggggtgaaaggtgtacactaccatgccttgctctcttggaatttttttctttaatatattggacttaatgtattgtaacaccttttatgccattttcatatgcaattggtaaactttgaactgttggttcaaggcagatacctgatagttatgccagtgatttattatatggctaaaaaaagcacgtgaaatggagattgtactagaaagtatagtacttacttttactattgatttttttttttcccttcttaggatgtaatactttttccttgtgtttggaaagaaactttccatttgttttttagttatttcatgtattcattgtttttttccttttagcttttggaggtgatttttttttatgtatttatttattatttatacagtgttctgcctgcatgtgtgcctgcgctgcacgccagaagagggcactggaacacattatagatggttgtgagccaccatgtgcttgctgggcattgagctcagaacctctgaaagaggagcaagtgctcttaacctctgagccatctctccagcccccttggaggtgatttttattctgtatcctttgttgacctggaactcacagtgcagcacagactggcctccaactgtcagttctcttgtcgtggcctcttgagtgctattacatatgtgaactaccttgtccaattttttttcctccttgtagaacacattttacccaatcgtggcggcacatgcctttgatcccagcagtcaggaggtagaggcaggcagatagatctttatgagtttgaggccagcctggtctatagaaagagttccaggacagccagggctacacagagaaacccttgtctcaaaaaaaaaaaaaaaaaaagaaaagaaaagaaaaacagaaagcattttatgaaatgttctgtatttgaaggcagatcataatttaaaagggaatattaaatattttcaaaggcaagcaaaagaacctgagaagcaaaggttctactttgtttacttaagactttttgtcatgtacacacacacacacacatgaatgttaaacacgtgtttaaaacatcttgttttgtatttttctcccttcatagtattttaggcatttcttcttgttgtttattactaagagagtatggggatggggagtatatgatagcgtaattaagaacatatagggttctggtaactagaaaggtaggccatccacctgggctctctcccaagactctctccctggccccctatcaaccatctcctattagaaccttttgggtttttttttgtgttttttttttttcttttttaaaatttcttctgtatagaaagattttgaattgattgtgttctaatttgcttaataacttaccaggattgttttttatcaggataatacttgaagtaccataaataatctccagccccctttcttgttttatgaagttggcagctttttaaataatttaaaattatacaatggattaaaaaactccatcattagttactaaattaagcacctttttcttttagactcctttctacgaaaccgttcaagttctgaccatgaagctacagcaatgatgaaagctcaatttatgagcctctgggatggattggatactgatcatagctgccaggtatttgaacacactcttccctgaacttgtatggttttgttaccaacagggaatttgctggggtgcgtattgcacttttatataaaattctttttcattatttttacatttagtgttaaatgatgaggatccgaaagaacatgatttttataaacttttacccatcttaatgattgccatcaggtttatataactcgaggagcccacacaccctgtatagttgttgctgtattacctcttatcactgctccatcagtggtcatagccaaaaaagagtgctctgggtgtagagtagattccgaagaggagaatacaagattaaaatgaagagaaatgatacttcatgagtagtcttttttggggaatggggttcgagacagggcttctctgtggctttggaggctatactggaactagctcttgtagaccaggctggtctctaactcacagagatccacctacttctgcctcccaagtgctgggttaaaggtgtgtgccgccactgctcggctagatcttattttaaatgtgaaataaaattatttctatactttgagtttttttttttttttaatttagcaaccatttagattttgttcttaaatactaaaaatattaacgtttctgaatttgagttttaactcataacttaatttaatacatgtataagtgctcttaaaaagcactctttaatattttaaagaaactacaaataagttcagtttttatcatgaataccttattatacacgtttattaggttagtttagctaatttcaattccttgattttgtttctagtacttcactttccatactttgatttttactttgttttaggcttctttgtttacctggaatcttaaaatacagctaatttagctcacttttcaatattttgtttttgcttcttctttttagaacattgccttagatatacatgtgccatttgtgtgttttgcagtttctaaaaagctttgttcaatattagtttacatttctcctaacagtatatcaaaacatccttttatgttttttgttgttgttttgttttgaatgaggcagggtctcactgtatagccctggttggtctgaaactcactatggagactatgcttgctatgaatttggagatctgcttgcctttgtctcctgagtgctgggatcaaagcacttgggataccatgaccagctctttatacttccttattctgttattatctcattaagtcacttttaagccttcttttatatttggtaaacatttaaaattttatcactttaatcaaataaattgtaggaaatcaaagaaaatgaatatggagattcagattttgtctaggaatacagaattgcataatgtgtggaacttaaatatgtatttgtacttacattttcctccctctaggtggcagacttggttaattaacaattttgctctgtgatttttgaatatcattaaatgtaaggagataaatagatttaatttggtggatattttaactttctctagagttgagaaatctaaaacttccaggcagagataaaatgttgctagataaatatattcctacataataataataaaattaattttgtgtagcaggtgtatgctgtcattaggttattgatattattaagaaattttcaccagatttgtggtgtaaccagatgtggttgtgccttttatccaagcactggggatcagaggcaggcaaatttctgtgagtttgaggccagtctgcacagtgagttccaggacagccagaatagggtatataatgataccctgtttcaaaaaagaaaaagaaaagaaaggaagaaaaaggaaagtaataaattttgttgatttgaatatatatctttgtctttattctgttggtttttaaaattgtttttttcatttccatcctttataagtaagtatcctcagaagttagtagggctaccagtgtatgtttctttttgtttttaaaattcagtctcttctccctctccttttcctccgttgtctctcttagggtctggagattggtcacagaacctcacttatgctagacaggcattctactaccgagttgtccctgtagccccctgtctaacagtttgatgtttgcttctacactcagctcttgtttgaagttacattctataaagcttttaaatttagtttacctcccaccgagctggtagtacagtgagacgatgctgtgaagcccagaagaaaaagccactggtatatattaactgccatcagaactctcatactcatggggaaatggttttcttttgggggggcagtgtatagtttctataacattatgaaaggacttaaagggccccttccactcacactcccaagatgtattcagttaatagccaaccatattttgtaaaatacaaatcattttaacagttttataattctttagtgtaggtacccattggtcatatcttatgaaatacaagtgtttttttaaaaactacactcttcactaatgggttcttctaactaaagagttgatgttttagttactagaaattcactagtctttccagacatgcagttgtttttttttttttttttattttatgattaacttcagttttatctataaacatttgagaaatgctgagttatagtgagatttctcttaaaaaggttagcgtaaaagccattgtcaagtctaaatggtaaggacctcagagaatatttattgttggtagaatttaattccttgtttgtctttgtatgtttaggtgatagtgatgggagctaccaatcgccctcaagaccttgactcagctataatgagaagaatgcctacaaggtttcatatcaaccagcctgtacgtggtctcagttatcttgtgtaaagggaaatagttgccttttaaacaggcttttatctgtgatttttttttttttttttttttttggctttggaggctgacctggaactagctcttgtagaccaggctggtctcgaactcacagagatccacctgcttctgcctcccgagtgctgggattaaaggtgtgcgccaccaccgccccgctttatctgtgatttttaagtattgttttgtttctttggattatttatgaaaaatagaggtataagaaactgtactagactgtttattttaggaaaacacagaagaaaatctaaactaaggttttggattaacacaattgaatttgttaactagaggttaaaggaatagctgaatagctagcctaaagaagaacaaccgagacttattaacaattacttggagcttctctctgatggataatgattctagaaacattgtgctgtgctgcagcttattaaggtgaagtgtgggaggcattcaaccttcactacttttgtttggcttttgagactagaatcttactctgtgacttgaaacccgttatatagcccacactggcctcaaactcatgacagtcctcttgcctcacttttcaaagggctgatttacaggagtgaactactacaccattcttcattactatctttttttaagcattcttttttgttaagaagtacccttgagtaagttgttttaacttcttaacaccctgtagtttctgtggaaaatcatataattgtgaatttagtcagcttaatattaaatgctaggttttctaggtagaaaagatgtgttctatatgagcaacattatatttataggcacttaggggaatttagatatttactcctttcagacttggtaatgagaatattctaactccattcataatcttagaattttccccaaactccattataatctttggctagatcatctggcccatttatattctgtaaagcatcagattccattgatgcagtaaaaatgggttcctgaaggttgaaggttgtgggctctgtaagctatgtcctcagagaactcttgtgttgcaggggaggcagactcaaaagtaaatagtgtaaaatgttctttaaaggtacatatacagagctgtgaagagtctgaaatggtaacaactaactaatctgtgggtttgtgggatttacacaaatctgttgggccttaaggatgtaggagtgttacaggtaaatgagacaagcaaagccttcctgtcagtgagcaaaggtaaattgtggaagcaggctagtgggtgggcttacagttgacttagcgcacagaagaaaacagatgtgtatgagttgggaaagggagactgtggctgtttagacagactttgtgtgctttatatatcaattctatagtttcaagcatattaggctaatttaaagaacatttgtttatatgaccctgaatgccaagattagtgatctgtatcaaattcagttgtaggactgttagatggctggtgggtaaggcacttatacccaaacctgaagacccagttttgggaacccatgtggaagaaggagaaaacagattataggaagttgtcatctgacttccactactacttttccccaaaatcaatgcattttagaaaaggtttaaaatattaaaaattgaaattctaaagagagctaagggttttgatgtgtctgttgtataaaaataggatacaacacagaaagtaacaattattaaaactgtcaatgtaacacagtgtgcattatcaaaatgaagtataatacgtttcatcaaatttgttagagatttgtatactattaactcacagactggaattttgtcattgttcctttttggttaacacacctaagagagtaattctttcttatgtttgctacagtgtcaaagaatattattaaacttaccttaaaattactctccaagcaaaatacttaactaaaaagcagttgttggtgatcatgtaacacaccaaactaacctttccatttaacacacaaattatgacagtaaccaataacagggtttaattttgtttaccaggtgtttttataatgagttcaaaatcttaatgttaataggaatgaatttcactatgacaaatttaaaatccgtctatttttatttaaggtattccttatttgtttattattatttatacaaggtattccttatttcatttattgtttttagataggttctcatgtggcccaggctgggttttacttcacaagtgcttgtattagaggcatgtttcagcatggccaactttatgtaattctgtaaacaagttaagtatagtttctgttctgtaaaaatatgatgtatccctgaaggaaatcactaacatttacataaaaaatcactaatattaatgagcatggaagtttttattgaagtgggagaaccaagaccgtattaccatgtcctccaggtattaatgaaaagggcctgtatgaaatgccatgagacagttactttgtatgctaatttttaaaacaaagaaaagccttaattaaaaagtgactaaaaggtgttttgtgatggtgaaccttcataaatttaataaagaaaggaaaaaatgaagaccataggactgtataggaaaagctggcgtagattacatgactataatttcagcacttgtgggattgaggcagaaaaattgctgcaagcttcagtccagcctggtctacatagtaagttccaggcgggcataccctttgtcagaaaaatgggaaagacattgttgctttaatatattcctttattttttttttacttaataagtactaaaggtgtattatttccccaacatgaataagaaacagaattcattggactaactacagatagctactgtgtaataccttgctctaacctcttaacagcttatcatttcctatcagttattatctaataatttacaaagggaaaaacaaaaattagttgatcggtagttttttttaaatgctaattggaaaattttctggtcttaggctctaaaacagagagaagcaatcttgaaactcatcctgaaaaatgaaaatgtaagtagagaattatgatttattttctgcttgtaaattctgtgctgttaatataacttgataaatatatatttgaagtagttttttaaagagcagtgtgtttacagattaaaatactgtgattttttcacaccattttatgcttgtataagaatgtgcattaaagaagtcttcattttgtttcttatttttactttatcgctgtgtgtttatttctgtttctttcttttccttttttgaggccgtttctctgtaacagctctggttgtcctggaactcgctttgtagaccaggctggcctggctgtcactgagatccaccagcttctgcctcccacgtattggggttaaaggcttgcactaccactgcctggcttatcactgtatttttagactgaagttagatttgaaaagaaataacactgggtatggtgtgcacagttacagttttagcattcaggaggctgaagcaggaggcctgtgcatttcagattagctagggttacacagtaagatataaataaagtgtactgctgtatatttttaagagtttgattttcttttcttatgaagtatatattttgcccatttttaaagttcagtattattttccataaagattgatagggttgtatgttgatttgtcttttgtctatgagttgcaaactttttccagtttcttatgtcttgttgaggaatcttccctctcttaatgtcttctgagtagaagctgtagtgtggcctgttgagatgacacacagtttacccgttagtctgttcatctttacttgcaagtattcattactaagagtcattggtctggctccagacttctgatttctgccacaccgtaatgggctctcactggggctccccttggatgtccttttgttgtcctgtgtcatggagatccttcatatgctccaatggttcataaatttggggggcagggtgttggggtgggtcaactcatagccttggttctgggcctgggtggtagctgagttggtcttcttgctagctttccctcattgtcactacctgggcgttctctccagcactgccccagctagctcacccacagctacagcctatagcacagaaaggggccaggtctcctgctcttgggccctcagttccaggtccccacactcacatcaccagggccaaccagctctactgttttgcccaggcaaggtgcagggccctctctcccaatatctgcagggggcaattctgctgctctcatgccctcagggttgactcagctgccactagacaacagggtcagcagctctagtttcctcaacaatgggatcagcattaatgtgctgccagacaagaagcagaggctgctttctcatgtgctgcagccagtgagggtgggggctagctctctcttgtgaccccagggtcaactctcacctgtcacaggtggtaatgggtgggtgtgggggctgctcttcagtctttgtgctagctccacattgttttcacttggagacagctgtaatatcttgtattgttagaccttatctgtccttcagcagaagagtttttatttttttcctttggggattttagaatcaatttgtcttactaaagaacaaaacaattatttttttgatggatcatcataacagtgaagctctttctggttttacgtccttttgtctgataactttcttgttttccttcgatgtattaatcttatgtgtgtgactggtctgcccgcatgatttaagtgcaacatatgtgtgcagtgtctgtggaagacagaagagacagtttggtttcccagaatgtcttacagttggggtgccaacatgtcagtgttggaaatggaaccctggacctcctcaagagcaatcagtgcttaaccactgggccatctctacagcatcctaatttgtttcatgttaggttattttctgctgctgtaacagaatatttagttatttagttcacaattctgttatgtcgaaagttcaagtacatgatgacagtgtatggtcacgttctaatacttcatgaaaagcacaggggcaggttatcaaaaataaagcaaaaagaaaaaagaaaaatcccaaacttgcaaatttgatactaactcattcacaggtaacattaatacacctcccagcatcacttgaatttgtcacttatccactgtatagcaattatacatgctatatatagaagtttaaaaacataacaatttagacccatgattattaaccatttggggataaaagctagatagcctttcctaagaaatctacatatattcatggtttcaggaagagaagacctgaattattaaaattagagatgagatggaagacattacaacagatactgaagaaatggagaaaatcatgaaggcatagttttaaaactatttaccaaactagaaaccctaatagaaataggtggatttttacatgatttactaaatttaaatcaagttgcagtaaataatttaaacagctctataacaagcagtgaacttgaagcagtaattaaaaatctcctgaataggggctggagagatggttctgtggtttagagtacttgttgctcttgtggaggacccaggttccagtcccagcatccgcattatggcccacaaccatcctaactccagttaccagggatcctattccctcctctaacctccatggtcaccagacacacatggtgcacatagaggcaaaacactgatactgtaaaattaaagaaatacaaaaaaattaaaatctgccaactaaaaaagcccagggtcagatagattgaccacagaattctttcagaccttcaaagaacagcttgcaccagtgcttgtcaaattattatatataattaaaaaaaattaaaaaggaagagccacatccaagctcttctaatgaataatatcctaatgtctccttttgaaatttgtttgtttgtttgggaaaggtactcactttcggtagccttggctgctggctggcctggtacttcataggtagcccaggttagccttcaattcccctcctgcttgctgaggtgatgagtaaagggcatgtgcccctgcccccagcttcctttgtcttttttgggggtggggggacagtttgagacagggtttctctgtggctttggaggctgtcctggaactagctcttgtagaccaggctggtctcgaactcacagagatccgcctgcctctgcctcccgagtgctgggattaaaggcgtgtgccaccaatgcccagctgcttcttagaacagccttccataactagaaattgactaataaaggtggcatttcacaggagtggagaaaatcatgacggcatatatgtatatgggaagaaaatgggattggaccctacttctgtaacctgaataaccttccctggcctccatactgttaacagagtgtgaaaattgctcagcttacttgcaggattaaatgaaaatgatacccataaggagcttatggaaatgagacctgattgtagatgataatcacaaataaattatttccttgttcattttctcttctttgcctgcacattagtgtgttttaaattcccacaaacttgttaactaggctactgtaagcttagatgaaagggcagaaccaatcactaaattaaattagtactgaggtacagaatgttaaagcattgcacttcaaagggatctatcttagtgtaaagagacttccagaaaagacacttgtgcatgtttctacagtaatgacaaataataaaaattgtgtatctcttttgaaaattaaaaattttaatttctaagtttttatggaactaataatagttttctatttctcttgactattataacatacttaatattaagtctcagatggatatttggaaatattttgcttaattttatatatttattgtaagcatgtttcatgtttatttaaggtggatagacatgtagatcttctagaagttgcccaggaaactgatgggttttcaggaagtgatctaaaagaaatgtgtcgagatgctgctctcctctgtgtcagggagtatgtcaattctacatcagaagaaaggtaactattagacttgatttctggtatttgtcaaacctttttgattagacaattgttgttttgctctgtaccagcctacttatagatttctataattgaattagcaactcattccctccttttttgccttttttttgtatatgtttgtgtatgtatatgcacatatgtgttcatgtgtgtgtatgcaggttgatactaggtatcttagtttttgagacgatagaggtcttactgaaccaggacttctaatctgttagactgttaggctggtcagtaatcttcgggatccttctgtcaccaccttcccagttctgggattgtatgcaggctcctttatttttttttaaatgtgagatcaaactcaggccctcgtcctttcacagcaagcactttacctctgagccatctcccacccacagctgccatttttctaacgggagttctataaatggagaaattgctgtgggggatcgtctagaattaaggggcaaaatgctgaatttcatttgataagcaataaaatgagtcacaaaaaactgagggttgccctctttgttaggaaaacagggttctctagaatctgcagatgttttctgtatctgaaaactaaattatgtgtagaaacaagtgttttcttccaggagcttcacacataccaagtgtggagctgctgtgggctgggcttcaacttgacaacaatgcagttaccaacataccgtttctcatatcaggaaattttacttgaaatctatttaaagtgtggtgagtttgagaaatcattttttgccacccttacttcagcaaaaataatttatcccttaattaactcctgtggaaggagtcccaaaaggcctgtctcctgacacagtactgcactataattttttttcacaatgtcagctctctgataaagaacttcttagtaaagcagtataccctttgaggtcatggtaaaggagtgtgcctcttactctgaagttttcataccaggtaaccctcacttgcctgtggtgttcagcatctaattatagtgtaagcttccctaacagctcatgtttacttttgcatgaggtccctgccagacagtcgcatggctctcacccaccatactgctctcaccctcccttcatgtgcttccatagatacagtcacagcatttttacctgttgggagtgttttcacatcatcaataaataaataaataaaaataaaactaccttcaaaaggtctctcttccaacagaagaaattaaaaggaataataaatttttcttaagttagttacactaatgatgaaaggcaaaacgcctgaaagctccaaaaatgtcagtgtgtaatttggctgtcagacttgaatcatcctgtttttctggaaacatttttccccaagtgtctgtgaactaccaagtagcagaatataccaggttttctgtttgtttgtttgtttttgtttctttgttttctgtttgtttgatcaggattaaagtaaaggggacttgaattagttgttccttaatgaaaatgttgggttttatttctatcttgtaaaaggctatacatgtatgtacgtgaatatatgcccaggaatgctaggtttttggttttattcacaaaagtaacttgatttctaggtggaattatgtttctgtttggatggctgccattctttaatgacaatgtgctgttcttaaattcttggtgggaagtgattgatttttgcacagccgttttattttgctacctgttactgctcggtgctttttaaaaatatcttttaaggaatctggagagatggctcagtgggttacagcactggctactcttggaaaaggacatgggttgagttcctatcaccgccactgtggctcattactgtctaactctagttccagggaatctggtgccctcttctaacctgcaaaggcaccaggcacatacatgtcgtacaaaggtacatgcagccaaacactcataaaataaaaatattaaaacgatgtcttatgactttaatatacacatttatttgctcttgtataaagataatttctggaagaatgggtctaatgtgttctcattgtctttgggattttgaatgggaaaaaaaaaaaaactcttggtatgcttttataatcaaaagcaaatacatttttagccagatgcatctttttaatgttggtaaatatttttaggtaggtgtactctaaaatgacttggcaatctgatggttttgtttacattttagtcatgaagaagatgaaatccggcctgtgcagcagcaggacctgcatcgggcaattgagaagatgaagaaatcaaaggatgcagcgtttcagaatgttttgactcatgtttgtttagattagaagtaaagatcatttttacagttgagtgatcttgtaagggatgtactctcatccttacagcagtgagagagatcctgcttgtggttttatactcagatcctaagttattatggtctgtcatgtaaacggtattactgcttgtcagaaatcatgaggaggaagttcagtccaacctgagtgtgggtgcttgtttgacctttttagccatatgctgttatagccttatagagtctaagctggtcttaaagtaataatttgttgagttattagtgagaagtgggatgtggttaggtgctggtttctcgacatgtgagtatgagtgtgagtgtgtatgtgtgagtgtatatcaatgtaaatatcgacatttttctttgatattctgtagataggtttaaatacagaagcttttgttttttaaaccccaactatggagtccaaaagcaccagatagatagtctgtagcataacttggatttaaggcaagatctgacaggtacagtgattcagccattcctagttgtcacttgttttggccacttgtaagttgaaaatttcctctgcagttgattgaatgaaccacatctgaatatgtgcatgtgtctcgattataggggttgtcaggggaatcagataacaaagcggctttctcagtcatcagcactgagtggttgattggtaggcagactcatggatttcacctcattatgctctgacaccaagtagacacttttaagttttacactgatttacattaagatggattgaatcctttcacaacagtgggcttgagaaacctcagtgctctttatatgtgtacatgactttaacagttctataactatgttcctcaaatgttgtttagaagttacatgttctttaattatgttcaaatttcatttggtcacccaagcaaaatgatagtttatataaatagtcattattaaatgtgctaaaaaatactcattttgtaacttaaattaaaaaattttctcagcatagtttagattgtacaaatatacacatcagaattcctgtgttgtatctgtagtcacttgatgctatgtgactacatatttatatgctacatataaaactgttctgttttcagacctcagtaaccagaattctgttgcaggcacctcagcatacaacagagcagaagataatggccacagcacaatctttaggtgcctcagaatcatcagaaagattaaattatggcaaaaatgcttttgtttttattacttgttttatttctttgacaagtaaatcttcatgggtttattggattactttctctggtattgtgtctcacaagacttactggactttattgctccatttgtgctttggtggttggagaatgcaggagaatgcctaggctaacaaaatgcaagtcatgcaagattgtgaaggtgttgtgaggtgaatgctgatacaagaccccaagaaacatgtgctttttatatgatttacaataaaaggtccttccttttgattctgtttcccacttagtccttgatctttttcacttactttaaatcgtggctttttgttgtttataaaatctatgtttggacagtttttatcttgcagttgagatttcatacttttacaggagacattttaatattaaattattctgttttaatatgagttttagtaatttgattttaatgtaatggcatgtttagatgtgagtgttgtatatactttgtttcttttcatttattaaattcagattatccaattgtagtagtgaatttgttatgtttctagtcccagatgaagagaaatacagtaatcccaacagccatgactcttatagggacattgagccataaagtaagcaaaactattttcatatgacttaaataactttttacagtttataatttccattcttctttagacatttcacatatgtagaaccagacttgccgctaatgaactatacattccaagactgtctgctttgtttctgttacttatctatgaggcaactctggtacctgcttgagggagtcagtcattgtgatagcagagtaactcagctgaggacctgcacagttactgctcaaatgttagctctcatggtatgggtgctattatttatacactaatgtgggtatcttgttggcacaagtgtgtcttagtctctaagccatttctgtcgtctgcactcaagggactaaaatgaaaaggcttgcctatgtgatgtttctctgaaatctcattgctggatgatttacagtaggtcttggtgtctgctgctgtttccatgccttttaaaattaggattataaactcagtgcttgagtaagtttagtgtcaacttttactatttatttcctgttgaatcccactccctacctgccggtagatccagaactcattaagagctgggttagagtaatctaaatattccgcatggaccataataaactagttttatttaattcatgggtttgatgcaagatgatagtgtcttgaggcacttgatcagttgcttgtgcaaaaataacattggtaggagtttttttttcctactgtgggttatttgtggacagtttttatggcgttcttctggatgaaacagattgggtaatatatagttacatttttttttttttttttagtcttagttagagtattaaaaaggattccaaaagaaaaaaaaaaccgaggatttagcctaaaattctagcattatcttggtacctgaaagttatagaatcctttatgtactggaaaaattctgtatagaggtctagagaaatgatgtaatagttaggagtatgtactgtttgtttttgcagaggacctgagtttggctcccagcacccatgtctggctactcacagtagcctgtaattccattttcatgggagtctattgcctctggcctctctgggcacctgcactcacatgttcccccctccccccacacttaaaagtaataaccagtcagcatgctcttggaattatattcaagaggacttgaaccatatgaaacagtctcctaactgaattgtctaaagtgtagctaatgtgtataagagtcacttcatgcaaatgaattcaaatccagaggaaatcttttcacagtctgaattgaagatatcctagtaaacctggtaaatgttggcactgttcatattaatgtccagtaagagtatcatcactaaaattctggtgtgtgtgtgggtgttttatgtgagtgtctaatatttagttctaaacctctttttgaggagactgaaaagatgggctcagcgattaggagtgtgcttgctgctcttccagaggatccaagtttgatttccagtacccagtgccctccctcacagttttctgttaactctgctgcaaagagttcaaggccccctgctggtttctgcaagcaccggcatcacatgacacacacatatgaataaaaacaaatgtgctttgagacattttagtttttgtgctctgaactgaagtgcaatgaatgttagagcactgtgtgggatgcatcgggaacacaggtttgcaaaccatgatggctcaggtgtttagttttgagatagggtctcctagcttatcctgaaactcgagcacctcctgcctgtttccctagtgccatatgcccagcaacttggctccgttttaaaccaaacactaaaacaaattgataactgacatataaagttgtaaccaagaaatcttatagaccatgttgttctaaagatgcaaaaatttcagaatttatcagaacgagtgagacactcagagggtgtatggcattaatgtctattcacaggcctgtctaagactatctactcaggagtctcttggcagctgtagataatctagaaaataatttgaagtgggtgggactcatggggatcaaaggggagctgaagaaccaggattccaaatattgagctctaaatgggttttatttatagcaaagattgctcaaggccttcatttttatcctctagtggattgcatgaactcttcaaacagtgcattgccccaagaactcctcggcttattgaaatgactggcattggagtggtggttcaccctaaaaagcatggcggggagcatgcaagataaacaagagtggcacatagccagctgacttagagatgccacagataacaaggtaaataaaaggcggtgtagcaagtgggcatgcagaaaatgaggttttcctgtggacaggcttgcaaggactgctacatgggatcctgttaagttccttcactgggagtgctggttatcatgtccaactctactaagtaaagtagcttaattgttcaagtttttatactgtctggtgggtatagagagctatgggaaatgaagtacagtacaggtttttatttccagtgagtacaggtccttccccatgacagactgaagggcagatgttacctgtcccttgtagtcctggttgcactggacctgtgctgaagcattaactgaaggagttgaccggttttagccaagcccctactcacccatacatcatccatttgatcttgtttgttttgagctgggacgagtttgggttacaccctcagatatttctggttctcatttgtttttaattctaaaaggtagaatgcagtcatcttgagaatccacaaagcatctagcactctcttgacatgctcttgacaaaatccaaaggagggaattgtagcccagcaggttgttgtgggtggtgtgtttctagattcagtccatcccagcaggtacactgttgtctgagtcttgcctgaattacccttgtataagtcttcctttcaggcaggcgcacagcttcacacactggatccacactagtccacttcctgcactaatactgccaaggtgaggtcaagtttacctctgaagggcttttcttcaagagtttttttgatagctaaatgaagtgttttgtgttttgctagccttgtttttttcttccctccctagaacctggctaaaatgttcaaattttagcaagtgacccatttatttttgataatttaagttaaattacagtgtaagccaaaattagtattttggaatgcatactgtgaattacttgaataccatcttcatttggtaactgtgttctatgtatgacccaataacagtattcaccaagaaactacatggatgatggcgttaggagagatcagtggctactctttcagtatccctgtagtcggctcccaaaccttgtctatttatcagcagctagacaggagatacaagtcattcaacagttgccagttcccttaaccctttaggcataagaaccaccaatttatcttgtccgattcactgatttcttgctcggaaagacagttatgcagaatataaatgctgactagactcaatgcctaatagaaaagaggaaaatgaggaaacaaaactgcaaacgctgtttttgaggaaccaagatttgtttcttgggttggaaataccagggcctgataaatattgatgtaaggtgtgacaaaatgattaatgtatgcctttccaggatttgttcacatttcctgaagaatgtcatgacctcgaagtacctcttacctgttgatacatgtatggacacatttcttggtctactttgccctgtgaattactaataggagccatcaagtaagatctggggagaaaacaaagaggagctatacatggcaccatttatttatttatttatttatttatttatttatttatttatttagaaactggatccttgtagcccaggctggtctcaaactcactgtatagccaaggaaacattgaacttgtgatcttcctgcctccacctctcaaatgctggaattacaagtatatgccactgtacctggtttctgccgttctgggagttgaacccagcttgcatgcatgctaggcaagcactctaccaacagagccacatctctagcaccaaacaatagctttgagttggctattacaccacgactgtttgtgatgagggtcagcagaaaaaaaatatgtgacaccattagaaataaatcaagcatttaggaagaagcaacagctgtgtgcctgaaggccgctgagggtacgggtgcaaatgtgtaccgccttaggcacatacacgaccagctgctaaggttagtgcagttactgggactgctgagggggaatgtatacctaattatgtttaagtctgttggtaaagctggggaaactctgtaaatcagatctgttcctatgagaacaagggctttggcttcattgtcttgcagtgaaattctgaagaacagagtcataagcaacccagtctcctctgaaaagcaagtgcttagctaagatgatgagtcatttacatctgaagttcacattagaaaatgacatgaataatggcgaaccgcttcttaataaagccctaaaagagttatttctcagtgtcgtgatccccatcagcagccattgtggccagccagtattcagcattacaagacaggaggacttgcctggtctttgagagatttattgaagtaagaacaagcatcagttggacactgaaacagttatactaactctagtactagaaaagaaaggcagctttttgcgtctttaaaaccacattttttttttttttccaatttggtaaggcactacaatatcatgttctcactgaatacatagttttagaggcagcggtgagtagctgtgacagaaatgagcacaggcattatacagctgaagactcactttgctgtggtcatggtatgtaacttactctcaaaagagcttttattagcgtttttttttttttaaaaactggcagtatgaaaaaaaaaatcagtttcttttttcagtttgtggtctcttctggagaaacctgtatttaagatgtttttctttactgttacgtttttccttggcaacaatggaccatgcataaaaatgcaagaattacctcttagaaaataaaactatcaaaagatttctcacaacaggcgcagtctagaaacttgtaacattaagattttgggataccctgaacctttgtgtctccaagaagacctgcttttttagcattctccaggagagcttcattaaatggcttcacagggacctagcttaggagtgtggtggtctgggcgctccgtgtcagcagggtttggtaatgtccattctgtgttacggtgctcagcagctctcagagcctatgtatcatctccatgcattcagatgaggtttgggttttaaaaccttttctgcagaaaacaacagttttagcttctcagtctaatatgtgggtcagttttggttacagctgcaatcagataggtgccttttcaagataactatggccacagcaaagtgtggggaatgtagttttcaacagggtgccctgatggagaattagtccctgggaggaattctcttcatcaaagtacactacactactgggaagtgccaccatactggagctactattcatagaaggtcattagaacttctcttcctgcaagaccatgccattttcacaacagaagtaagtcacataattctttaagatttaattcacatcttcacatatttttttccagttgcgtcttcaactcatacattgggcagcaagactttatagtcatgaggtgagccacatgtccttcaggctgacagactcttttttttttttttttttttggtcatttacacagaagaggctgttgtatggtttattacttccagtaagttccagcttggcaaagttaagtgtgcttctgtttttgggcaagtcaactagacacatggtcacattttcaagaaatctgacaaaattgctttcattctggaatgtataacaatgtatttacctaagatttagtctccagtgtggctttcatatacataatgaagtctgttttaaattatagacacaactttttacctcattacaaaatactaactttaaaattagtcgtcaaggagcaattggatacaaagcatttaatcacaaaaatagaaaaaaatcgttagtcaaagagcatttcagagagaccagaaccagggctacttagtttatcttctccagagatctgtaataatctgtcaacactttccatgctttgggggccatgaagccatctggagggtcttcgccttcccgggccagcttcctcatacgagttcctgagatgaagtcaaactcatcatgcctgtcacggtacagcaacaaagaactcagtggaggtaagtaacagctgacctaaagttccctgggattagttgatgggttttctctaaatagccgcatgctttaagatgggcagttctctgtcttcagaatctcacagaacaaaagaggagtaaaggcagatgtctgtgcaggtcttggacatctgctctcatatcttcatgccagaggttatcttgtgtgaatttagtatggggcatgaacaaatcataaatgctcactgaaactttctctgtgatacttccttaaaatactaggtgctcacagtgtacacaggaaccatatgtgtgggaaggaacaattttgttactgtcttggagtttcatatagcccagcctggccaaagatagcggtgcaattttggtcaccctgcccctgcctcccttgtgctgtgataataggcatgtgcaactatgcccacttgaagaactttttgtgggtgtgctggagatcgagcccagtgctgtgcacatggctagacaagtgttctattaggaagctacatccatagaccaaagagaaatatttatgtaccaagaactacaagtagaggactctgctacaactttgggacacagcatgtgcaaaaatgggtcttaactctcaagggagtgtttttccaattgggagcatgcagactggaaacttccagagggtcagagttttgcctcatgccaattgtcatgtcaactaaaattttctctagaaacctaccttgctggatcgtaaaagtccatggcctttttagttttattgtaggcagccactcggaatggaatgatttccacagaagtgaggccaggggccatactcaagaccttgcccccgtgggtaggttcatagaggtccttctttgtctcagggtggggcattcctgccggatccctgcccacgatgtagaaattggcccctgcgatcatccggcatctgcaatgccactggacctggaaaatatcacatagggtcatgatggtcatgagtccaagccacatgtttctcttcatggcaattccttaattttgctttcaaagtaattcagaaatgcaggtcaactaaaagtagcaaggaagccctaagccttgagcacttttcaaggtgggctgtgttgggtgggacagtatcctttaatctctcaataaagcaagcagctcaggaatacttactgttagaactgggaattacatgttcttgttttcagacaaactaaaatttaagggatattcaaaatccttagctgccagtagtgaaccaattacctttcatatgtaagtgttgattctagcttagcatacttgccatatttaaagttctgacagaaatacaaagggtgagaggagagctgtagaaaggtgtggaactctaatacaactgaagagaattcattcattaaactcagcttggggcacttggaagggttaatcacgatcctgtccatcacagtccactcttaggaccactggagggctcaccaagataggaagatggtgctgccttgtaaggacacttctcccttctaagaagtttgtggggcatggtgaattacatagagtacttagaaataatacatcagcgttagcttggtgtggtgatgtggatgagaaaggtcctgttagcctcaggcgtcggaacccttggttccaggttggtaccactgtttgatacagccttgctggaagaagttattcactagggatgggctttagtttaaaaagctccatctacttcaatgtgttctctgcttcagttcatgcttgtggtaaaggatatacgctctcagcttccgtctcctgtcccaagcctgctgcttgctgccatgcttccctgctacagtagactcatcactttggaaccataagctacataaactcaggttgccttggcaatggtgtttcatcacagcacgagaaaggcaacatggttaaatacttcttgccctgactccaggtgagctgtgcttacctacctgcctgcctcagtcacaattcccatccccatattgttcaagtgatgtgtttatgtgggacttaatgcttctagcatccttacaaacacaaaaatgaaaaagttaagcgaggatgggggaaagagtaacctgaaggctgtagaatctgctcattaagagtgagcccacaatttgcaaatagttttaggctgtgttcttagtcctttacccagctcagggaattgctcacctctgtgggaccagcgtacaacataggagatggaaagatggcaacgacagttgatttagggtccaggaccccttcctccagcacagctgcatgctgtttcatcctccagttcagaggcacgtcgtcatccttggtccagccccccagagggtgtagcaggaggactgggtgcttgtagcccctctccaggagcctgcggcgggtgtcttgcatcagcagagcatgaccgttgtggacaggattgcgcaactggaaagcaaacacggcatctaggaaggaaaagccaacgttccaagtgagctatgttgcttgtccatcagaataggcgggaaagatgaagcagtgcttgctcaattctcccattcagtctgctaagtcttgatagtttgagaatgtgcctaagcggttagggatgttagtccaacaccatcagcactggtcaattgcttggataagatgggatgcagaggcaagaagccacacaagagaaacacaactcaggaattcaaacaggtgctgtctgcgcccttactgaaacaccagtcctcttgcaccggctgtaggctcatcatcaccgtgagagcctgcatatagagcacatagtgcatggggcgacgatctacagatgaaaactgcacttgggatgcgttcatgaagtcttactttgttctggttccaaaatgtaattaatgtataaccatggcagaaaaccaagaattatataaaagcctgaaatgagaatcacatctctctcaaaatgtatacaatgaaaaatgaaaaggtttcctttcgtgttctgctgccacccccaagaggcaggtggtgtcactggcagtctggtgctcccagagtcttttgtgcagaagtaggttagggttttttttttttttaacttttttttttccaaagtatgcctgtggtgtgtgcgtgtgtgcgctcgtgtgtgtgtctgtgtgtgcgcgagtgtgtgcatgtgtgtgtgcctgtgcatgcatgtgtgtgtgtgtgcgtgtgcgtgtgcgtgtgcgtgtgcgtgtgtgtgtgtgtgtgtgtgtgtgtgtgtctgtgtctgtgtgtctgtgtgtctgtgtgtctgtgtgcctgtggtgtgtgtgtgtgtgtgtgtgtgtgtgtgtgtgtctgcagtccgcttttgcacttaatggatgcacttgagcagttactctgctcctgcctacttgaagctactgtatagtgttctgtatgtgagtgcagcacaactgtgatatgaacaaaccaatagatgttatcacatgttaaaaaaaaaaaacacacagcggggcagtggtggctcacacttaatcccagtactcgggaggcagaggcaggtggatctctatgagttgggggccagcctggtccacagagttagttttaggacaaccaaggctacacagagaaaccctgtctcaacaacaacaacaaaaagaagctgggctagagagatggcaccaagattatgactgtgtgttactgtttcagaggactcaagttggattcccagcacccatgtcaggcagatcacaaactggctagaactccagcttcaggggaatatgaccagacagaccctctggcaccctcccccaaaatgtgacatacacccacacagacacccacgcaacacaccattaaaaggtagataaatttttttaacgctgattcacccaggcctggtatcacatgctgtaatcccagcacttgggaacacaggtaggatcaaaaattcagcgttaccattggctacataagaaattcaatgccaggctctatattaaaaaacaaaaaacaaaaaccactcccgatacacttaactttttgactacagtgctaagcagtattggcagatgcagtagcactggattacataccagcattcatgtctttccacttctgcttgagctccagcggtgtcaggcggtattggtccatcccatcatcccatcttattctctccagcacctgcaggtctccaccaacgagccagtccccaccttccatcaccatctagaaggaaaaccattgaagccaatagtaactatactgaattttacattttatttgaagtctctgtgtgcgcgcgcgcatgcgcacatgttcatgtgtacaaatgcctgcatatgtggaggctagaggtcagagttggggaacttcttcaatagctcttcacttcgttttttgagacagaatttctccctgaacctgttgcttgcaaatttggctagactggctggctggtgagcctccaggagctgcctgtctttaacctccctggccacttggatatttctcatgggttctgaggggatgggactcagggtcctcataactgggcagcaagctctgtcctggcagaacctcctccccagtttggctgttttacttagtgactcatcttgagttactattctgcacgtttctaatagcatttatcaaacctttaacctctgaacttgtggccttcaccagagttgctgggggcgtagagcagaagcacagacagggccctggttgagtcccagcagcacattctcacaacacaaaaattaaggaccttccccacaaggcttcagtttatatggattgtatccgtcagtttccatgttagaaattaaaacagagaaacttcatctaaaaatagtaatgaagctattgcatgtaaaaaataaactcctctccattctcttccccaaataggaaggacttcattacttttacccatttgccactctgtatgacctaatagaagacagccagcttttcatagctactgcatttaatccgagccagtgagttttggctggctatataaagaaaacccaactgaggttttctagaagaaggaagaggatttgaatagcatttttgtgcgattgtggatattccttgacactaacacatgtactgctccccccccatccttttttgacaggatcttactgtgcaacccagacttgcccccaaatggggattctcctgcttgagcctcctgaatgataagattataggcatttactaccatgttcagcttttaagcactagtttccctttgtgtgagacacctttctgtactatatgtgtatggcatgtgcatgcatgtaaaatccagaggtcaacatcatctgtcttccttgatcaatatcactatttgttaaacttttgcaaatttgtgtgtgtgtgtgtgtgtgtgtgtgtgtgtgtgtgtgtgtgtgtgtgctcatgtacgtgtgtatgtatttgtggacaacttaaaggtatctgttctcctaccatgtgggttccagggattgaattcagttggttagctttgtctttccccggagccagcttgccatctcttccttatttttgagacactctgttcatttaacataagttcagctagcctggatagccagcaaggcccagagatgttcctgactccacttccctcattactgggattactggcaggttttgccatgtatgggtcttgtataagggtgctgaggatgggtaaaattcaggtcttcttagccaggtggtggtggtgtacgcctttaatctcaacacttaggaggcagaagcaagtggatcgctgtgattttgaggacagcctgctttacagatcaagtcccaggacagccagggctacacagagagaaaccctgttttgaaaaaccaaaaacaaacaaattcataacttcttcctcaaatagcaatcactttagcaactgaaacatctccccagtctcccaattctagtttcttaaaggtaaatttcagtgtggaatttaaaactatatttatttttcatactctgttttattaaaactccattttttgaatgattctttttttaaaatttatttaacttttattttatgtgcatcggtatcagatcccctggatccaaagttacagacagttgtgaactgccacgtgggtactgggaattgaacctggatcctctgcaagagcagtggtgttcttaaccactgagccatctctccagccctgaatgattattttacccaagaatactattatattgtattattttattactgttatttatctatctgtggctttggaggctgttctggaactagctcttgtagatcaggctggtctcgaactcacagagatcctcctgcttctgcctcccaagttctgggactaaaggcatgcaccaccactgcccaggtactattattatttttactataacatgctggtcaactagaaatgttggttcactgagtttgtcagtcttcaaaggctgacatattttagaattgctgcgcgtgtgcacgcgcgcgcgcgcgcgcgcacacacacacacacacacacacacacacacacacacacacacacacacgttagcatcactgatagtctcagaagaaaatcttctaagtatgaacttgctgtcatacttatagtaatgaaataaatgtttttgtttgaaaccgcaaggttgatcgttggcaactaataagtactttgtttttcttgaagcgacagaattttgttcattaaaaaaaaaaaagaaaaaaaaagcttgctaaatatccaagtctgaagacatgcatttgtcaacccacattcttgacaccagggtttcagtggtgttccaatggctgttttccccaaaactcaaacaacttgacaagaatttttccttacaccagccatcgaggattggggtgtatagcagaagcatcttgtaaatttccctgtttgcaataagttatgaagaaaaacacatgtactcaaagatcacttttacagcatcataaggagtgttcttcagggaagctggtggcttcgtagtacagttgtcctaactgatgaaggcaccagcagtttgcctgctattgctttgtaccagccacgccaatggcaacacaggaagaaaaagctaacactgttacatggttctgcacttgggagttctccagcaaggtcatgagtactgcaaggtgctagagttctaagagccatgctctgagaacctctactggaaccttcctagtattgtctaatatattttataatgttctcaatagaactccaaagtttggaggaaaagttgtttttctaccatgtaattattggttagcacaatttccatggaaatcacccacagacacagcctccttcatttatacccactttaaagataaaagaaagtccagtgagcagcaaagtgtagcaaaaattgggtatatagtgcaaaacagacagctaaaactcccattttctcaaaagacctctgctaaggatgccaaggccactctctgtggaaaaggatggcctgttgagcaaatatgatgaggaaactagatacccgcatgcaaaaggatgaaatggccctgtatgctatgtgcaaaagttaaaatggattagtgataaacgtagaagaccccaaattataactattataataaaatgcttaataaaataaagggagcagtcttcatcacattggggttgacagtgacttcttggctatagcaccaaaagcacagactataaaagcaaacatagaaagttgggactaccctgacctgaaaacttctttgatctaaaagacaaacagggtaaaaagggaatctgtacatagggtgactattccaaatcctatgacatcataaggggccattcctacaacctgtgtctaatagtatgtgcctgtaacaccagcacttggggctgagcagggaattggtgagtttgcgaccagcctgggcttcacagtgagatcatgtctcataaaaagaacagaaaacacctccagagcaatgataagtaaaataactcacaatgaaaatggcagagctagtgagatagctctccgtgtaaaggtgctatcgatccctgggacctactttgtagaaggagagaaccaactccaacatgttctctgatggccacacactcactcactccccctcaagaacatatacaaacatataaaaaaaaagatcgaataaaaatcttgagtagacatatctccaaatatggtctttaaatgtccaaagcctgcaaatagccactaccaccaactgtaaagcaaatgaaatccaaatgaggcaaagtagcatatccattaggatgcccattattgaacaaacaaactcaggaagcatgtactggtgagaatggtgagggattggaaagaatccttatgcactggactctaaaaagatgaaaaaagctgcttggccaatgactaggattttcatctgttagctcagtctcaaatatcataaatctatatattttataagacttatcttatagaggatgactttcactggcaccctcttttgccggtggctcacatggtgccactggaggaggaaggggaaaaggggacacttcctgtttctccttgctaaatatgagtctccttgctatgtcatttccggcctggatcaccacttttcttctacatttcccagaatcctctttgactcctagtcctgtctaacttgctgccattggccaaacagtattttattcaacaatcaataagataaacatacaaagaagtactttccccatcaaggcagtggtggcacatgcctttaatcccagcactcagagggcagaggtaggaggggatctctgtgtgttcgaggctagcctggtttacagagtgagtgccaagacagactccatagctacacagagaacccctgttttgacaaaccaaaaccaaccaaccaaaacaaaacttagaataaccttttgatccagcagtcctacttcttgaagagagactttcacattcaaatctccaaatgttcatagcaacccgtatgtccaccagtggatgaatggatacataaaagatggaacacaggtcagccttttggggggggtgttttgttgttgtttatgtttttccagacagggtttcttctgtgtagtcctgattgtcctggaactaggtctatagaacaggctggcctcaaactcacagagatctacctgcctctgcctctcaagtgctgggattaaaggcaagcctttaatgtgaaagaaatcttgccctatgcttccacatagataatcctgagaaagtacgacagttgtttcacaaaaacaacaacaacaaaacaagaacaacaacaaaaaagtcacaacacagataaccctgaggacagggaaagtgaagtaagtcacaaaaagagtacatatgatgtcatccatccaaggacaaaatgaatctctaaaatgttaatacagttgagggaggaaagagtgactgagaaagcttacttacaaaatagctagtagaaaaaagttggcataatgtattgccttggttcagcttcccattatagccagatgctgatgtttataatgactgcatcccagaggattcagagaatagagggttagcctagtgtgattgctgtcacatctgatatcttcagttaattttattgtcacaagtggaataagaaaggctgtgctatgtagaatctagtgcacccaaagcatgcagctggcatcttgtgtggcacagaatagccttcacagcaacaaaaaagacatggcactgagtttgagcaaccatggaggtaattgtgcaatggatttgtctctgttttcatggcctcctttctaaactctgtcctcaggcaaaccattgcatactcatattttcaaatattagtattacaaatgactttgtcctcactgcttagaggggtttttgaaagagttgacccagatccctaggagtttcgtaacactctgcactctatgggtcaaccttacactggactgttttgatgaagacagcactgaaacacctttcttcaccacccagagtagaaccatgtctgtgaagatcgatgctgaaactatcttcttagtatcctttggagtctccaaaggtactctgtgttaaggtgctcagactatccccagacctgtgtccagctctcaggaagaaaggctcggtacttaatggcttagaaacatccacctccttccaagccacctgacaaaggtttaaagggacttgaagatcatgcgaggttaacatcgtagttttcagataaaaggccgttttaagtaaaggaagtggcagagtctaggtgcccatggctattgtgccaaagccagaacccaaatctggaacttgagaaaagcaagctttcttttttaccacatccacgggctctcctcagtggccccctgactgatacttcagcatcaccctcagtaatgcctgtgacaggtatggacagtacacactgttttggcaggacatagaagactgttgagtcatacctgtgagtcaggggaggtgggactaacgccagaaagcagtaagtaagatgaagctgcaggagcagaaggagcaaaggtgatgtcatgaccagctctggagtgtctggagcagaaatgtatggctgcgagtggtacaagctaaaaggtaaacttttgcaaaggcgatcccaaataaaggctgaacagttcaccctggctgaagaatagacaatggattagacacttataactcaagaaatagagaagatgtgaaatctggcccaaactggaacaggagtgagtgaatgtatttgagtaatgcttggaggaagagctgtcagaacatggtaaccgaataggacagggaaggaggaagagcaagaatggcatgtaggttttgtttgtgggtttagtgcttgcatacagagctgctgggtaggagagtgagtttagggattggctggcatgttgagtttgaagtattttgagggcatatctagataaagctgtcactaactgtaaccaagtgtttcttaaactgtacagaatgtgcaaatcacgggcaactcaaactcccaaggaccagcctggcccaatgccagtccagccagaatctgtgagacctgctctgtgttatttgaagcagggtcttgttatgtaacccatgatggccataaacttgagatcctcctgctgcagcctccctggtcctggagctgcaggtgtgagccatgatggctggcataatctgtgcaaattttaaggtttttctggttatcccactgatcttgctgtctatctggtcttcctgtggatacaagggctacaaaaatttctgttcttgccttttattgggaagacatactttgttctcttactttctatatctttaaaataaatgtaataatttttcttactttacaaaggaattgtgagaaattactggttgatgagagagtgccctggataaaacatgctgggtttcctccaagcattatttccacacattctagctgttccccaaaatgaaagcatggaaatactttgtgactcaaagcgacttcttgagtagaagggtcatgtggttgtttgaataggaatggcccctataagttcatgtatttcaatgtttggtcagtagggtatgatgctacttgacaggaagtaagaggtatggcattgttggagtaggtgtggccttggaggaaatatgtcactggggatgggctttgcagtttcaaaagttcaagccatgcccattgtctcattcttcctgctgcctgcagatgcaaatgtaggtctcaacttttccagcatcatatctgcctacacactgccatgcttcccaccacagtgacaatgggactaaacttctgaaactgtaagcaagccccaattaattctttcctttataagagttgcagtggccatgatgtctctccacagcaatagaacactaagttcaggaatactcctaggtaaggagttgtggaacagaggcaggccatttccttgggaactgaccattctctgcaaacattctctgttccatttgaaaatataagggccacagttacttttgtgaataaaactgttagaagacttttgtcttcaaaggaaaaaaaaaaaacggtgttaaagtattagtgtgagattcagggtgttaaaaataagagttcttagccggggtatgacaacacatgcctttaatcccagcacttgggaggcagagacaggtggatctctgtgagttcaaggccagcctggtctacagagtgagttccaggattggctccaaagctacagagaaaccctgtctagaaaaacgaaaaaggaaaaaaaaaagagttctttacccaataaaattcatatgttattttttttccccaaacataccttccagaaagccaagtgtaatatatgtggactaatgctttctctccagttatctatgaccgtttcttaccactagttcctctaatggctagtagtgtagagtccctgacagtactgtcaaagacacaggtcacaccgccactctcccttgcttctaagaatctgaccgcaactgctgacatatattgcaagacaagatgaaaagaaatagtcactcaggttccccatggcactatctgagattagttttatgtctttagtgcaagccaagcaggtgttaagatgtttgacccaaagaggtgaaatctttgagcagagataatgataggccgttattcttaaggccactgaagaaagataaggccccaatcctgtgtgattacaatcagaaaagaaatggtcagagatgtcattgaaggcagaatgtcatattcctggagcagctatctcaaagaccttctgccagactgcagggggtgggggtagtgaaactgcccagatgactttgacctgcctaggcataaagacaagagacgtgtatctcaaaggctgatggttgtgtccagtaagtggaaaacctgcttcccttgctctctgagctctttcttctgttctgattaagaaggcaccaagggctactaactcggccttgagaatgtctttcctattttgtaacatttcacagcagattttttttttctgcaaagttataggtctggaaaagctgctcaatatattttggcttcatatttttgtcaaaagagaaatgaagaacacggtacttgacccatcacaaggtccttgagagcctcttgggctttgctgctcatgatggtactgtgatcttgaaagctaacctagctgaggaattgaagatgtcaaattagattagtaatgtctccttttgcttccaccctgatgcctgtatcttggatgcaggatggatttgcattcagtttcacagaattttgtgggaaatggactttaccaagtggctctccttgtacctcctgactcccactttaataccaactgcagtcagaggttgctgagggatatgatttggctttatggaggagagaactaaatgaccctagtcagaggaacagcttctgatgagaatgtagtatcttacttcttggaatttatcactatgtgtactgagctttgtttatggaaagatgtcgttgaaccactcactggccaccaaacataaactctgagttgttttcagggttgtttgggtccattacatgtgttcttcatacactttcaacatgaacagggctgcaagctctagttatcattttgtgtctagtttcagctatgattttgatcctttactcatggtgctagactattatctgcctagtcctatttatctaaggcaaagatctgataacttaggagatcaagaccagctttcaaacaaaagtacccctccacccttttttttttgacagagtcttctgtaaccaagcatagtctcaaactagctatttaactaaggctagcctctgatcttgcctctccctccctattgttgggattcataggcttgacccatcatacctggcttctgaaaaaatatgtctttactcaaccatgaatttggggagatagctcaggcagtaaaggtctttctgcataaacatgaggaaggacctgagtttggattcctagcaccctggtaaaaagttgggtgcaacagcacatctttgtaatcctagccctggggggggggcgcagagatgggcatatcctggagtttgctggccagctagctcagctaaactggtgagctccaggttcagtgagagacaatctcaaaataacaggtggagagcaattgaagaaaacaccccatgtcaatctctggcctccacatgtatgtgtacatgcatacacatgaacatatataccatatatgcacacgtgccccaaaaaagaataagaatttccatgtggggagatggttcagctacctgagttctaacttctaggacccgtataaagagccaggtgcggtggcatgtgtctacagtctcagtgatggcaagatgagaagcagtgacaggaagacgcttgctggcaagctagtctagcctgtctggcaaagtttcagtccagtaagagaccctgtctcaagcaggaggttgaagaaatgacacccaaggttgtcctctgatctctgatatgtgcaattacacaccctagtgtaccccacacccctttaaaaagtcctcacacaggttttgtacttactttgatgtgggggtgctttgcagtggctgttccccacactcgggaacaacgctcctctttcctatgctcatagaactcaggatcttgtagtatagccaccctccgaccttcatacatcagggcaaacttgctgcagccttccagccgcaccttgtcatccacagaaacgggcagtacgatgggaacactcatgttgatgactccatctatggaaagacccatgtgatacgtgagtgccagatccaaggtaagcatccttcagggatggttaatgtgtgcacagtcctccttctgaagcctctgcttgggcatcaggacccaagcccagcacagacatgctgctcctctggtatctctaagactgtgatggggactccttgaccgattcctgaggtaggttgcctcagtaagtaatctagctttggggggcagaatggagatacctcatctggcttgcctttttaaatcttggtcctgaccctatcacactatgaacagtgaagtcttttgttgttttaaagtttgtttgcttatttattgtgtatgtgtgtgcactatgaagagtggagtcttttgttgttttaaagttcatttgcttatttattgtgcgtgcgtgtgtgtgtgtgtgtgtgtgtgtgtgtgtgtgtgtgtgtgtgtgtgtgtctatacacagagaccagaagaaggcttcagatcctctggagctgaagttttagatggctgcgagcctccgaagttggatgcttggaactgaacttgggtcctctgaaagagcatcaaatactcttatatcactcagccatctctccagctctaagttttactctttaaaaatcaaataaaggggctggagagatggctcagaggttaagagccctgactgttcttccagaggtcctgagttcaattcccagcaaccacatggtggctcacaaccatctataatgagatctggtgccctcttctggtgtgcagatattcatggaagcagaatgttgtatacataataaataataaaatcttaaaaaaaacagtcaaataaagaatggacaaaccgaaagttcttggtcttggaaatgaacctgtgtcagtgttgggtattaccaacataactgaactgaaaagaaagattaaaaaaatcacagagttcacaccccagacaagcaataatcaaccccttgatgttggtctagatgaaactctatcttcaaatgtttccagacactgttcatctcatttctctgggatcacagtcttgctggctcagctacaattaaagccatcactcaaaacacattggtgtagggcatgcctggagagttgctccatgggtaagaacacttgctgttcttgcagaggaaacagatttggttcccagcactcacacaacagctgccaaacaactgtaactccagttccagaggatcagacaccctcttgtggcatccataggcattgcaggcatgtggtacgcagacatagtgcagtcaaagcacccatatgtatgtaataaaaataaatcttttaaaagagcatgggtgtggaaagtggtacaaagccacttactaaacttgtgtgcactttctctagagagtaagactatctcactgctgctaagtgtctagaagaaatttagaggaatctggctgttccaatccctctgtatatgacacagagaagctacatctttgacacaggtcaacctaaaggaaaaacttgtaaatcccagataggacctggcagttaactttatatgtcaatgtggctggaccatggtgcccaggcatttgagcaaatattctcagtgtttctatgagttttacttctagatgagactgacatttaggttagtgggtcctgaataaagaaaatctttccccatgatgtgagtgggtctcatccaatcaatgaaaggcctggggaaaagagacccatttccccagaagaggcaattcaggtagcagcatctttccctctgagtctccagcctgcaggatgacctttcagattttgaacttgctagactccacaatcacatgagccaattaaaagcaatctacacacacacacacacacacacacacacacacacacacacacacacacacacaggttctgtttctctggagaacactgataagtagatatattttttaaaagcattctgcagagatgcctcagcagttaacagtctacacacacacacacacacacacacacacacacacacacacacacacacacacactgctcttgcagaaaacccatgttaggcagttcacacccacttataactccagctctagggtgtctagggtgatcagatgcctctggtctctgtgggcacctgtactcacgtgcatacactcgcatagacaaataagcttaaaaatttacaaattcatgaaagtatcttactatggaaatcaaaacacccacaggtatctcacaagtttcctgatgaggtgtgtgtgtgtgtgtgtgtgtgtgtgtgtgtgtgtgtgtgtgtgttggtcaagttggagatttatcacaagaccttttacatgctaggtaagcagggtaccactcaggtatatctccagctattctgtgtgttgtgtgagtggataagaggctttaaagatggtggggttcattttgttgctgtcactttgtttttgagatggagtctcaaaaacttccctagagctacggtgctggacgaccttgtgctgctgatagaactttccaacattgggaccacaggctgtacaacaaggaccagctatggggttgctgctattttaatatgaaattagccaggtgtagtaaccatgcctgtaaacccaaaatttgggaggtagagataggatgattaggacttcaggggaatcctggattataatagtgagtttgaggctagcctgggctatctgggactctgtctcaactccctcccccccaaaaaaagtaagaacactgaagaatttttagataaaatggttaaaaagatgtagttgctttccagtttgaaggctaaaagtataaaaactggttctcatttcttagtgatgccagacagtgtgaaaacatgtaaggctatggcctctttcatttcccttttgtaagtgtgctcaaagttgtaactagtctgtctttctcagctgtgcttatggttgaaaacagagggctctggttcatgtaacacgaaagactcagcattaggtcagggtttgggagaaaatgagaggaagatgaaagaggaaagcctccaggggcagagaatccggagtcctgaaatgtcaagtccacttagagtgcttctgacctgtagagatctgagctgcgttcccgtgggacataaaactccctacagctacaagcccagttgtcagcaagcataccagtttgtcctctgtaactctctcaaattagtaatccctaaaagaatgtcacaggtcagaccgcaactgccagcaataaagacatccggtcgcccataaaagcctacagtgtacagtagatgccattaaagattgcaaattagatggcctacaggaagattttgttgctcaagtaactctgcttcactagaagccagagcacccagcccctttgcagagaaccccaaactcaaagtggggagttctcgaaagacgagttagcagtgagcacctccccaagttttttgggtgaacacactataaagtacagtatcaatagaagtctgtgatgaactaaaactaaatctaccaggaaaggggaggttaaccaagaacatcctgggattcagggatgctccagtttgaatgagaaatcatgctctctgtggggagagaggccgagatgctcagttctgctcacagagacttgattaaactgaagtaaagcaaaggtcaaagggagtgtcaggaggccgagccctgccagcatgctgtcaccactgacatctggaggatacgttgtttcctagtggcagattctgatggagtgaacgtccacagtgatgcaggataaaagactcaacctggggagctctactaagtaatagtgcccactgctcccatatgcctgcaactgcaactcttcatgggcatggggatgcttcatttggttccccgtcatctttctctactcttgatttttgttttttgtttgttttggcagtagtggggattgaactcagggctttgcttcatgcggggaggcaagcgctctaccactgaactacagtcccagcccttttctctactttgctttacaagatttatttttatttttaaattgtatgtatctgtgtggtggtgaaagcaagtgcccatggtagcaagaggcactggattcctggagctggagttacaggtggttgtgaactgcccaacatgggtgctgggaaccaaactcccaccctctgcaagaacagcatgtgctcttaaccactgagttatgttgttgacagcctattcgttacaaaaaaaaaagattattttatttcatgtgtatggatgctttgcctccatgtatgtgtgtgcagtgcctcagggggccagataaaggtgtcaggttctttggaactagagttacagttggatgttagcttccttgtgggtgatgggaaccaaacccaggtcctctgcaagagcaataagtgcttttaaccactgagccatctctccagcccctctagttgttttgatacataaacatatccaacagttgagctgcactgagcattctctgtggcttccaacattccttgagcccttggtctttcccttcacatgcttcagttctcttaagggttgccttatttccttatgctttatctcattttggaagagtattgttgcttttaactttaggacatccaacagataatttcctatctaactgaataatttttcttttgctttaaacagttgttaatccttttctctttagcattgtagatctgtttattggttgcatagcctttttttccccccaagaaatgaaattagcattattacataattaggctttttaaaggaaaaaatgataaaaataatatcaaagataaataacatgtttggaattttacctcattctggtacaatgtagacatttatagtcccacatttatattggttttcacttctgtaactatcaattatgatagcttgcaattaagtccatgcataatcacacatcacaaacaaacaaggaatgatcatacacagtccaaccagatatatttactttaaattaaatctaaaatggattgcctcattgactaaaaatgttttgttaatgataccgaaaaatttaatttcaaatttctggaactgaaaggggaccagaagtcattagacgatcataaatttaaaagaactcaggaacaaaatgttcaatgataatttagaaacaaggtttgcttatgttagctaaactcaacataaaaaataacagtttcatctgaaccagaaatttcctgttgtttgtacttgaataatcagaacagtgtggtatggttttactataactggttggactatgaactgaacaattccaactggttaatttggatttttaaatattatatcctcaataattttttaaaattaacataacatatctaattacaataatttaactacttggagggtgaagtacataccatggagggccacgcctaaagaaatacaaacataaaaaacatgttttcaggtctccaccatgagaatcttgaagtaacagtatcaaggaacacattcctattatggaacttcacatataccgcatgcaagtatattttcagctccttcttatgctatttttaaaaaacaggcacatgacaccaaatatatagtaatacatttttttgtggaatattgctcaatgcactctaaaacgttcaaaaagaatatctacttgaaataatggtaaaacatgttagtcaatcttttaattttggcaagactgccacacggtttccaaaccagaaaaccgtgtagacacggacagtcctagaatgtagagacccagatgtgcttagaggacctgatggggtgcctgggaaaatagatacaactgttggaaccatcagaccctagatttaaattcaaattcaagtgagatttctgccctttctaacacttactacctcatgaagactaaacagcttcatgcaggttaaatggggtaacctacatcaaatatatgtggggaccctcattcctgcctggaaggttcctgatgaatattttaaataatggagttgtcttcatcccactgagcagctattggccaacatctgtgacatttatcctaggagggtctgtgacaaccctgaaactacacttccagcaagagataaagttacggaagacattgacatgaaagtagtaacttgtaatgctacgaccatgaaccaatggttgctttgggggattgtttagttttgattttgtgctaaatagacagattgcactttttagactcagggtaaactgtgaacctttcagttaattaaagctaacaaaatataggagatagggtggaaaggaaatctgttgctttcgggttgtaagtaaccaagagatttacagtttgatggtagaaagatgtgtggctgcggctgtgccatctcagtgtcaatggtggtgactcaaacctttgtgagctgtctaacgtgaggtaatatctgtatggatgatatctcactacgccttctgatatatatatatatatatatatatatatatatatgtttatgatatatatacattatatacaaatttataatctataataataatatatataaatatcctggagcttaactgtcttcttagtccaaagccatcacaccaggcatgtacttgaaggagactatggcatgggaagtgtaagagctcaagtggcctccccgagatgccgcagcctgggaaattcaaagtgctttggcttaaagtgatgtgggaagaagacatttctgccatcggcctcagagaagctgtcctatctgctctataagctccctccctcttcagggcctctctgtccacagcagctagaggaagccccatatctgagtgctgggaaggaagctgttgctagtgactaactgtccgggctgactcaagacggtaggactccggataagccacttcaaattttcaagcgctcttaactgtcagtagtaggggtttgtttgtgttactagctaacttgtctggggctttactattggatgagcatttttcttaaactttcaatatcgcagggaggtagcactgtaattaccatctccatcatataggcgagggatctaagccccatgagttgaggtaatttggcaggttcatagccagtcactggcagataaatccagtcagctcagcttcacaactcacacttttacctgctattgtattctacttctagttaggccaaaatgaaactgagacacagagagtctgatatcagtgatatctttgttcagtagtaggaattgaacccagggtctcacccatgctaggcaagtgtactacctcagagctgtgtccctgttttccctttttattttgaggtagggcttcactaacatgtctaagcagtccttgaactcgtggttctcctgcctcatccttcaaaatagcttggattacaagcccttgctctcttgtcctggatctcaggctaaggatcctttacttccattgacattgaccccagcagccccatctaccactcaggcatctttctttatggagaaattcctgtacaaggcactcgttggaatgcgctctcctctttcagtgtggtccccccaccttgtcctgtggtcacttctccatctgggatgctcactcatagtcaacatcttggatatagctggctgctgggttcaacagcatgtccttgatgcagctgtgttcagcaagtgtcaaatgaagatatcaagattaatgtcttatttccttgtttaggcaccctggcttcctggaaaggagtccgttggaaaggccagcaagagggcagcctggtgtagaaggggcagcagacatgaaagggtcttgactccggtcttggggcctcacttctaagcagtgtgaatgtgagcaagtcatttaccctgagctcagtttcctcatctgacaagtgggtaactgctagggattttataaagattaagtaaaacagtacttacttgttacagcaagctagacttaaagtgtgcttttggcttgttacttaatttgagaaacaaaggcttccagttgtagggcatgcttagttacagcagaggatgaaggtgtgccccggtcagtctgagaattctgcttctaggccattccctaggtagccccataagccccagagtatctttccaaacactaggtatctgatttggtcctttcttcctattaaagctttgtccaggtttctcccagcaccccttccccacctggaagcatttccccatcgtcttggaatagagaacccatgtctgaggacctcaggagactccaggaaggaaattcttagagaacagcctgggattcttctgggtagcacttgcttccaatctggaccagaatagtttttcaaaaaccgtaaccctgtggttggaagggtgccatcacattctcttgtcagggttcagagggtcaaacagtcttcaagtatgccatgtaagggtttgagactgacaattccacagccaacaaggaaagcaggctctgtgacaccatgtgatgggagcaatgtggaggaagggagttccctgtgagtcagtaaaactgatggactgctcctggatgctcccaaatgaagcttctgactatgagatccagcaaagaatatgggggggggggtcagggttggagtctttccttggcttcacgtacaagtaaagctttcatttctcagtaacttggttttaaataataaatccttggagaatgaaaaaaaaatccctaaaaatggaaacagacatagtagaagggacacactgcaaacaatctaaatattctcgaagtaggatttgcaaaccaggggttaacagtcctgtctatgtgcagactcttaataagcagtaagggacaacatgaaacataccatccagcagagtgtcgaagtgtataatttgcaagtactccttctccctcatgaagcctttgaggggagtggcccagccttcactcagaacctgcacccactgcagatccagctggaaaacacaggaaacaaggggaagtgtcggtcacctctctttctcaggccccagggtatgtctccctattcagctggcaggagggtgagaggagaacctcccatgttctaagtgtccccatttaaaactccatggccttctgagtcaagggccagctatatgtaagtctgggactttcctgtaagtgggtgatcacaggactccacattgagattatttaaatatgttcagctgtaactgttcccaccatgtgcaacatagttaaaaattcactgtcctttcccccctcacaacatgagggtttgactgtgcttttacataagatgtacttgctggccatttgactgaattgagcaagcctttgactctatggtaaaggccaacattgttatcgtggtatgcaaatcttttaagctcctggggctcgtggagggacttcgagctcctttcccaccccagttaggattagtttgccaacactcaaggcaatgtatgattggaacccacaagcacttgcggttgatcggaggatgaaggctatgttccacccatcttcttggccacctgcaaagctctgttggtcctttaaaacgcaacacaccggtcactgctctgaaacctttcctgtcacccccgtgacctgaggagtcactccttaggttctgaagttctctgccctgcagaccattttgttgttggaactgtcaccctgcactgctttgacaggcttacttgtctgtctagagtacaggggtgcttgggttcattttacagaaccaaggagctctgttcataagttgtttgtggggtcctaaatagctgaagcaacatgcctcataaaaatctgcaaatttctaatgaaaaataaaaaaattagcaatagagacttgatcatcttgtatgcacaagtaagtctggtccatacaaatgctacaagctggtcagtagctggggttgcatttcacttcttccagctaatgagatcaatgcaaatgaagctgccatccccttttctcggggggaaggacccaatctgcagaggaagcttctggaagaacttgatcttgcataccttgtatctatattctccacacttgaccttagtgtcctatatggctctgggtttcatatctgggtgtctaaggacatattttttggtgacagttttctttaagaggatatccacagagcaccttgtgggtgtgagctgattgctagtgataaacttttccaaaagacttctcttggacctgttggttatttaattcttgtctgtggtggctgtcattttgcagaggtagcagtcagttctaagcaccagagcatggtcttcacggtgaagagtctagagtagcatccagccaagactagtaccgctttcccaagtttcatgggcttgcacgtatcgatcaacagagccagaagacacacagcaggaaggctcacattgttttagatcagggttgcatttgtatccctggcaccctgcctctatttcatcatatagcgatgtaggggagccgtgcaaattgtcctatgcaaacatggctgttgctttctcagtcagagagaagtcgagaggatggcgaatgtcttcatagactcatccttactagatatttcttacagtcacaagaaatggtagggcctgcaagatggctcagaggctaaaagcaagcctgataacttgagtatgagtttgatctccaaacatagtggaaggaaggagaaaacagactcctgcatgtggtcctctgactccactcatgcacacacacacacacacacacacacacacacacacacacacacacacacactgggggaggctacacaaaacatacaaataacagtagttctaaagaggagttgtataatagtttataatgtcagacactaaccctgagtccctctggctactatgtgctctcttaccttggtgattgataatgctgggagagactcagcctcagctcggacctgatcaactttgttttctggcacaaagagttcatggatgcccttgatggtggtgtggggtacaatgttctgcaatgaaacggagttggcaagagtcacaaatgagaatggtaaggagagggttttaatgaccaaactcaggttctctttcaacacacacacacacacacacacacacacacacacacatgcacgcacatatacacgcacgcaggcacacacatacacactcttacctgctcttgcagaagctccaccacctgctgcacgcactcacttactgaagacaagttggtcttcagcacacactctggagtttcaggtttctcataatccgaatcgatgcctgtgaaccctgcagggtataagatctaaatcatatctgtgcccgaggaagaatgttcttaatcaataagacataatatacactgcaataatacgttaaactgaaatgtaatttatgactggaagttcaaactatcatgcttgacctctcgctatagacaagaaagttttcagctatatttttcaatatggagagcctcaagttagccatgatatctagcaaaaagcaagccttctactgctgattgggatccaaaaggaagacaaggagggaactcagtgaaacccattcttaaatccagtctgtttgcaatgtgcattctttctctgaactttactccttgtgcctgaggtgccgttcttcaaagacaacccccccattttaataaccgccccccccacaccctgaacacactgtgctttcataagtgtgagctgatgcaattgtgacacagggtacgtagctcccgacagatttctaaggacagtaccagaaactggcagggtaagtaactgtcaaagctgctgctacttctcatacctttaatctctccagctcgagctcgtttgtaaaggcctttcacatctcggctttcacagatgtttagaggcgcatctacgaagatctcaaagaacgggagtcctgctaactcatggattttgcgggcattttcacgatcctgaaaagcagagtgtttacaactgtagaaggtgagcccagagtggaggggcatacccataatcccagcactagggcagaagaagcagaaggatcaggaggttcaagaatagcacatccttttaatcccagcactcgggaggcagaggcaggcagatctctgtgagttcaaggccagccaggactacaaagtgaattccaagacaggctctaaagctacagaaaaattctatctcaacgacctccccccccccccccccccgccgacaaaaaaagaaccaagacttggatacaaaatgagttcatggccaaccaaacctgagctacaagagaccctatcacacccacccaaaaaaatgtttggtattatttgaatgtgtctccaaactttatgtgttggaatttttgtttgtttgtttgtttgtttttgaggcaggatttttctgtgtagcttttagatcagactggcctgaaactcacagagatctgcctccttctgcctctcgagttctgggattaaaggcgtaggccaccacttcccagcccaagtgttcgaaatttaatccttgagcacatatagggatggttcttcgaggtggagcctttagaggaaactgagactagacttggtcatctgggagggattgtggctataacaagaaaaacaaactgtgggatatggtggggaacaggcacaactttaatcccagcacttgggaggctgaggcaagaggattaggaatgagcctggcctggggacgtacatagcaaaatgggaggtggtcaattgccggggtgttgaattagcctaactcttgctctttgttgcatgaaatacagtatgaagctctcatcagatgccagcaggtgctgacaccatgctcttggggtccaaagtttccaaagtcatgagccaaacaaacctctagtcttcctaaattcatcaagtctggaattttgttatgagagaaaatggattaggacagtttcctaatgagatccttcatggcaaaacacagcgtacacttggacttgatagtctcgaggtaacatgtgtccagtagagtccttccagaaagcccagagtcactctggtaaacacacagaaggacttcccacagcagctacagaacgcagctcccccttagcagggctttggctcttgaaacaggaaggctttgctagaaacttcctgctttagagcagacccaggacaccccggtctgtgttgtcctcattaaacccacaaaagctgacactttgaactggctgccctgtttgggccacataaacattctcgttcagacaactgaagtaacaggccatggaggtcttgttcaactctttcaactctgaccacatgtccttggtgacagtcactcataaaggcttcctgtcaactggggcactaacttctggtaatgaggcagctctcattacataaccaatagcaaaacagaggatagcaaaacagaggaaatgcagggcacatgaggagagggggaaatgggtgggcaagtgaaagtctgacctcccaggtccattggctgcagggcactgctgagggagaaagggaggaagtgggtgtaccaccccctgccctgggccaaatcttttttttttttttttttttttttttattatgtgtacggtattctgcctgcaggccagaagagggcactagatctcattacagatggttgggagccaccatgtggttgctgggaattgaactcaggacctcctgaaaaccagccagtgctcttaacctctgaaccatctctccagtctccggggccaaatcttttacctttgtgaatggagaaatgaagctggtaatgcagatcaggccggcgtcagcaaagagcttggccacctctgcaatccgccggatgttctcttctcggtccccggcagagaatcccaggttcttgttgagaccatgacggacattgtccccatccaaggagtaacaagggatggcatgggacacaaggtattcttccaaagcgaaacttatggttgtttttccagcgccggagagacctgtcaggacagagagaagatgaaaacagagtaaggtgaaacatgattataggcccagcctgtaatccccgcgtttgttagatggagaccggacaatcgggagttcaagtctagcctctgctccaggaaaccattgtcttagtaaaccaaagtccctcaaaggatgaaaaccaatgagataacctggcaccattatacaaaactaaactcttaacaatattctcgctttaaacaaaaatcattaggatctggaaagagcacaaacccgagttcttacatttatcttgaattttggaagtttttcaaagcaaccagggtttgtacatagggagacctgatggcatagactgtgggctgttttgcctgtaaacatttttaaagattagaaaggtgttcttacacctggcgttggtggagcacacctttaatcccagcactcgggaggcagaggcaagtggatctctgtgagttcgagaccagcctcgtctacaagagcgagttccagtatagcctccaaagctacagagaaaccctgtcttgaaaaaccaaaaaaaaaaaaaaaaaaaaaaaaaaagaaaagaaaagaaaaagaaaaagaaagaaaggtgttcttacaaattgaggtgctgcctgctcttgagaaagcaaagctgtggtgacaggagacgtacttcttctgggagcacttagtggagagggcgactgacacccagaagattggtaagtccacctccctgtggatcccactgggtagccactggacattagaacccattcatggccctttggctgcaagagttttcaaaaaagactgtcaaaacgcaaaggtgttcgtgctggccaaggctgaagaggttctgagttcttaaggtgcatgcctgctctgatctaaagacacttcatgtctttatgtgaagacagatgcgacagcgagcataatatcagtatggccaggccactctataattttctaggtaaggagaatatggcaggggtggggacacaaatgacctaagggctcagggtctgacctaccccggaaagcttgcaccttcacagttcacttgtcctaaagatctttgagcatgaagaatatgccaagacacaaggctgcaactgcacagaactcgatgtggaaatggaaaaatgtgggggagaaagaggaaagaaaggcaagaaggcacctggggatgggagggtgcagagaatgtcacagcaaaactaggacagagctcaggggaaaggaagcatggggagggagggagggaggagggaggagggagggggagggaatctgcaagagataaataaattggcccccaggtttgcagacccattttaaaagtctaacaagagagcatagaagaagtgtccactgaaggttctgggaatccactgaacccctgccgtttcttttgaatagatctcagtgagacattcctcatataacttatgccagtttgtaggtaacgcaaagtaggaaccttgactcactggcctgttctcttgcatcataacactgaaataaaatttcctcccattgtctcagctgttggagagaaagggcctagcctcagtcacagctggcatgtgaccaggccactgggtgtgtactataacacatcagactgacactgtcctcgcaaggggcaagcactgggctgagaacactgacagtttatttcatttcgctccacctgtaacacccaggcatgagcactttacaaacgaggatattgggactcagagaggttaaatgacctgtgcaaagtcacatagcatatgtgggtggtctggtctacatgaccgatcttgaacctctgaagcccatagaagaaaaatcaggggaaataaaccctttacatttccacttatcctgcctaccagttctttttgttttttgtttttttttttccttctcaaaggggtgcacattagagaacacgaacttcatgtgtctgtctccacacagaagtgcttccctggtaaacagctgggaaaggcaagcagattgcagatgaggagccttcggaatacagatgtccctgctactacaacccaaagctcacagagtgagctaggggaacaccacaggaggaacaataggcaagcaagtccaccatgttggcacttggggttccatgcccattgtctgacctctccttagaggatagatgaagttgttttgatgcaaataccagctgtgaaggaaaccaggaaaccaggaaaccacaggcaccaggaaaaattcaagaatagcaaggaacaaaacaaaacaaacctaatgtgtatcacaattctataaccctacactgaaagggtaaagcaggggagaccctgtctcacaaaccaaaatcagtgcaagcacacagtaagtagcctatagaaatcgtcaggagaaattcaggtaggtcctccagcttgtccacattcttggttagactttgcctgcgcgagcagaaaatagcacacacacctctctcactgcccaaataaacatacttttgtctctagtatcttccctgtttttggaaagtcctgtctacaaagccagtgaacctggctttcccgttctgaagcctggcaatgccactttctgaagcctggctatgccactttctgaagcctggttatgccactttctgaagcctggctatatcatctatctatctaggtaagaactcagacatggtggtaggggtcttaaagcctaattgcaagtttctcactaacccctaaccttgggacatgtggaatgaaaaggacaagaaaggggacattcactaggtcatctcaataacagcaatgtttctacaggcagaagacaaccttgctaaggtgagatttctagggatccttctcacagattcagtttgatagtggaataggcccccagaatgtcacgacatcagaaaaatagcttgaaacatctgtaccctgaaagactgccaaatattcatggttgaattaggaaaagcccttttgtcatggcaggaaatggatttaggggtgaatatgagcagctccttagagctgcaagaaggtgtcattatctgcttgtttcatcttgtgctgtcaaagaatggtaactgatagctagtaacctcccgcagcccaccaggctctggttctcgtggtgatgactgacagtcagccagctacacaactcttcagtacacttctgttaagcctcaaacatctactaggggggtaatatgttgttgggtaccaataaccacaagtacatcctgttttctactcctggctacagactgggccttgcccactgtcatcaaaaaaatgagctcttacacctggagtctctccatgagctcttccacgagctcttgcacctggggtttttccactgtgctgtaagtgtatataaggttgctctttccctggaaaatggacagacacacgtagtacaaatggctgaatggcccggtttttaattaaatctgcaggctttcgtctgacacttgaacctagtcctggtttggacaccacaatgtgtcacaccgggttccttaaaatcatgtcaaatatcaattttcatcttaaaaaacggtacctggaaaagtgtgtgtgtgtgtgtgtgtgtgtgtgtgtgtgtgtgtatacctgttagccacacggtacatcctcggaatcctcctctggttccaaccacctgtcctctcttattcctgctcacatgatgggcctggtagacgacattggtagatttttgctgatcctacaaaagaagataagattgagcataatacttgattagtaaaatgcatatgctttacatgaagcatatacattcattttgactttaaattgcagagttgaagtatgtaacagtttctatgaaacatatttgaaaaatgtccctcccatctcccagtgcttgaactttttccatctcactcatttatctacacataagccagcagaatttttgtttccataaaataattaatcttgaagtactatgtaatatcacattgactcatagaatacaatctgctatataactaatagaattatgtctctggcctttagaactggcaaatagagtaccagtcattaatgttactagtttgtctgaactctgcctttagaataacctccatgcccttttcagactattcaactagtctgtcataattgattccatggcagttaaaattgggtaccttctgtaggaggtggagggcatttaaaattgggtaccttctataggaggcagagggaaatgtctgcagctttaaatgcatgttctccccacatcctgtgggcttgaatagtaacaaccaaatattccagcagcaaggggaattctagtgagagctgtttgacccatcctgtacctatggagataggtgacatgataaagtcttagccaagccaaagctggatgtggtagctcacacctgttattcctgtacttgggagactgaggcaggagggttgctgtcgggagccaaatattgtgctattgaaagtgtcttggggtccaaacctctggttccagtaactgtaaccaggagctccagtctataattgtattgcagatgctaactaatctgctattgaatggcatagcctcagtggagaatgcctcctagtttgcatctctacagaactaagcatttgaataggcctgcaccagggcagagggctaagtgtagtgacaagtgaggacagatagagttagggggtatctggtggagggaaggttgagagagatcgtctgatagggtccaggaagatggaagagacacggtctcagggtcagggaagcacagttaggaaacagccaggaagatgctgaataaagcagagactccagttttgcagcatggaactgagagctctctaaagatgacaagatgcctacatctggtctttatcgctgttgggttactaggaattcccaagtccatgctcccccgtcttatggcttccatggtttggggctgagacatgccgggccatgacaggttgcctggaatttgaggccagcctgggctacataatgagtttcagatcaccctgtgctatagtgtgaaatgtctcaaaatgaaaagaaagcaaaccaacatggcttctccctacctagccagcagtgaacctggaagagtttagtttttaagcacagtggctactgcctcaaaaggactaaactctgtttcttctactttcccagggtcaacattcgaacattgtagcctttcaagtccccaacagaaattaaaatgtgccagttatgaggcacagaggccagttcacacaccacacagatgtatttgtgttatagtgaagggaccagctccccattttggcagccataacagcctaacacatgcttgtgtgaccttgccttagtcactaggaggtcagatgtctgccttgtggcaaggaaccaatcagaagttagctggtggtgctatgctttacggctctgggtgtgctttacaaacaagtgtacagcaatgatgtgcagagcatagcaaccaccctgggagggcctatgggccataacaaccagttgaccaatcaacacagggcaagccctccaagcctggaggcacaccaatcctgagcctgtgcatacccctagatactccccttacgctgccctacaagatttctatgcagatgcttcgagctgtcttttatagccatccgccatggtggatggatggaaggcctaagctaacatggggttagctcgttaaactatattaaagcctcgtgcagtttgtatcaagctttcgagtctgcctagtgattggggtgaccacggtcctgggctgagattccggagccctgagcttcttggggggggggtcttacatttgggggctcatctgggattttcgaccacccctcacctgagtggattcgatcttggaggtaagatcaatcaagctcacaacttatatgttcaaagttatgtccatgtttgcttgttatgtctcttgctgttttgttggtttggtgccaaatcaaacttgaatttgatctgtgcctgcgcaggacttgtatttggttatttggaccacagggggagacagacatgtcctgagactctgggtcctgccctgggcgaaagtccgaaggtcatttgatttggaccatagggaaagcagacgtgccccagaagcagacgtgttctgggacccttggtcccaccctggacgaaagtctgaggtgtctggggaaaggaaggatatgtagtgtcgattctcggaggggcaactggccccctggactctgcttccctcccgctctgtaattttggtttggtgccatgtctgtgtctgtaatttggcttgccacgaggtttgtcctctctgttgtgtctgtccttctgtttttgctgtttgtgtctgtctccatactaaccacccccatccctggatttcacctcaactgtgatagggagatgtgcccggaggatcacagactgctgccctgaggacacccaggaggtatgaacgggggccaaggacgcttggaccctcctcagttagcggcaattgtaggcgcctggttctgccacccgtcttcctggcgccattgccttataagtggcaatgggttgggttggcgtctgttcttttttgtctattctgtctctgtgtgttttcattgttggttttcaattcaggatccaccacgacacctcctttcgttgagtcatgtggcgccacactaggtaactttcttttccagtctttgtttctgtacggtttctgtaaagcctggagggttggactgggcagttgagcaggtttgttatctatgttatctgatctcttgcaatccacaccctgcctgcatgcttttcagtgctatgtcagttttatgttttcaggtctgctggttctgttaattttgtaaatgtaaaggtcctttttagggtttctagcgacatctgtaagtaggccttcaagaattgtttagggcggaggttctggcggcagccttctgaaatctttaggggagacttggttttggatcaagttgatctccacagggctagccatctgaaattctgaatagatccctagtctgtgttaagcatctctttctgtccctactgcccacgcacatggcatgcatgggtcaggggccttttcttgctgccctgagcatgtggcatgggacaggagttcctctgccatgtgccatgggttagaatgtcctgcagcagagtcccctgaggctgctactctgacctccaaccattgctgtggcccacacagctgagcctagccgatgtaggtgagtctgtttttctatcctcacctgctggtctgtgaggcatgcgaagtggggctgtctctgccccaactgccatcctgccatgagtcctggcttgtggcgggagtttccctgccctgagcacatggctgcaaggccaccatctgcctggctgcccggccttctctgtgctccacacacatggtatgcagggaaaccacgggggtctttttttccacccatgcattggcagagggtctgggatttacagcagcaccccccccccccaggtctctgccttgagcacatggagctggggcagatgaactatctggcctgatctaggtgttctaaagaaacagccttaaagttattaaaaaaccttaagaaggactttgataagagtttttatgttgactaagaaatgagagaaaatgtaggagattaaaataataaagagaaaaaggaaaaaagaaatttgtctaagaatgtctaaaaaatcagaggaataaaccaaaggtatatagaaagttatagagggttaaagcaagtcatagaaggtcagagaaaaggttgttaaaagtcagagaaaaaaatgtaaactgtttgatatggtttctcatgtctacaaatagtaaattttaaaaaaatggtaatataagttaaaattttgacattaggttaattctgatttaagagttctgtttatttctcaagtaaattatgtatacttgttttaaaatgttctgtttcctggtataacctaagttctgttacagctaaaacaaatggtgcaggttaccgccattttgtagccagccacatgacaaactggtcacatggctgactggtagccattttgctgaagttgaaaaaagacatttaaaccgccatcttgactaaagaccacatggaaattagaggtaccatcttagaaacaagtttttcaattaagatttaaattgttactacttctatatattacagaaagacattaagggaatttagatttctttttaaaaccggttcttttaattgtttatatttttgaaatgtcttttttattaatgtttgtactcaaagagcttcaatttagaatcatttttaagcaaagcctgacaatgtaaagttcttgttttataaaagctgctaatctattataagatgttgcagtttatgttttcagaagttaagtttagggcattgatggcacacgcttttaatcccagcactcgggaggcagagtggatctttgtgagttcaaggccagtctgattggcagagtgaattccaggtcaggctccaaagtcacagaaaaaccctgtcttagaaagaagttaagtttaagcaagcaggtaaaatgtgtacatgtagttactgtttaaggaatataaggtaactctatcagtttaaaattcagctgtgctaagtttcaaatattttactaagttaaaaccagttacagtcagactgaaaattaattacagaaataagacctcacctagccacctgtgtgcttaatgtggctttagttacttaaggcaagtaactaaacagacatctaatacttcagagacctgcagaatatggcatttaaattgttgtctttaaagtttataatatcagacagactgccagatcctgacagtgacccaaagtctccaaagaagattatgaggcaccccagttcctgcacctggaccagtgagcgtgatgctcagatgtgatacctgccgcttgccagaacctggccaagattggacaaagctgctggacactggaaaattgattgcaccccctttgcctagacaaaacaaggtcagtcttttccatgtccctcttccacagagagaaaaaaacctctcaccttataggcctggtgaagattgctgttctttgagacaactgcctccagagataattgagagacttgggtatggctaactgtatatggactggcttctacctggcttctgtcactttttagtagattcagataaaatatacccttctcagatctctgaaatattaatgtttgtcagcttgacagcatcagacagtcagatccacaagactatagtcagcatgttagctgataaagtaatgagttacctactgttaagtcacaagttcgaggtttttaggtttattttggttgtcagcgaagtataaacttaaagggcttttcatcaggccaaaggcacctccgtccaatccacacctggctctctggacaaaaggaaaatgtacatgcttcttgcccaaatctgtagttatttctaggacccaaaattataaatatgttcctgctgtttgaacagatatccagatatctgctttttctgcactgtgggcttcagtaaataagttttaacttattttcctagtttaaacatgtcttaaacaggtttctgcttctggcagacacatctgagacatatcagttgctgactacaggctgttcctaaatagactgcgagccctagacttgctgtggatgtgaacctgtccagctgatgtggacacccctgtctctgcaacagagtctgccaacagcccctgatggattcctcattgcctaaattccttttttgcttttgactagtatttcaaccttcttgggtccctaacttcgtcccaaagtcagcaggaagtagcatggaaaagaatatgccgcccattttccctggttaaaatgctaagtaagtaggaactcccttgcatggggatgccagtatctctcacttcctgatggggaccatagagagacagcaattccatgattggaatttccaaaaaaaaaaaaaaaatgggggaatgaagggaccagctccccatttcagcagccatgacagtaacacgtgcttgccatgaccttgccttagtcactaggaggtcagatgtctgcctcgtggcaaggaaccaatcagaagttagctggtggcgctatgctttacggctctgagtgtgccttatgaacaagtgcacagcaatgacatgcagaacatagcaaccaccctgggagggcctatgggccataacaaccagttgaccaatcaacacagggcaagccctccaagcctggaggcacaccaatcctgagcctgtgcgtacccctagacactccccttacgctgccctataagatctctatgcagatgcttggagctgtcttttatagccacccgccatggtggatggatggaaggcctaagctaacatggggttagctcattaaactataataaagcctcgtgcagtttgtatcaagctttcgagtctgcctggtgattggggtgaccgcggtcctgggctgagatcccggaggcctgagcttctgggggtcttacaatagtaacatcagtctagctaggtaatagactatgagatcttcatgtaaatttttatcggaaggtaaaatgcctaattaatagtaaaaggttaaataatacagtaagcacagttaatacagtaagcacagtttgggtgtatgtttatacaatataacctgttattcaggagagaaagaaacttaaggcaaatcaacagatttgggactacccatatatgtctgtaatgtagtaatttctgagttgtaaaaattgcctctattccctctgtctgtctgtctctgtctctttctctccctgtgtgtctttctctttctctctctgtctctgttcctctctgtttctttcatgtgtctattttatttactctttcagaaatcatacatgtatgcaattaaatatcatgtccacccacatttccctcctccaaatcccaattcccccaagtacacttccctcccaacttcatgtcttccccccttcccttccttccttccttccctccttccttccttccttctttccatagcccacttcctatatagtacatgggtatgcggtcatccaatggagcatgggcgagtgtccacaacctcaaaggagaatacttcttgctgtggaacaatctttttgtacactgtgaatgtttgttgcactcattggtctaataaagggccaaatggccaatagctagacaggtagaggttaggtgggacttgggaacaaaaagagagttcaaggcagagggagtcatgaggagtcacgaggagatgtggaaagaagcaagatgaacatgctgtgctgtgaaaggtacctccacgtgacagagtgcagataagaaatgtggggtaatgtaagttgtaagagctggttagtaacaagcctgagctatcagccaagcacttatacttaatattaaatctctgtatggttatttgggagttggcagtcggaatgaaaaactgcctacagattcttttcccttagcagctgtcaatagccaatcattcctgagttaggtgttgagccttatgggcccttccctccttcctgcccccttcttggctgccttcatcttgtgcagataaccagagctgctgtgagttcatgagtgcaatagccatatccagaagaacacatttctccccccccctccagattttgcattctttctgactcctcttctggtcctgaagttgcatgccaagcactttagccactgagccatcatccttcctgcccctcaatgagcttaatgtgcatttatacctggcagagtgatgaaagcatcaacgttttttttctggaacaagttctagtggatcctaggaaactctgggctacatggttcagagagcaaagcaaatcaaatcatctcttttccatatcaccctttagatactaaaaagccaaagggggctatagctagagctgtctgtgggttgacgtggatatggataaggaagtgactatgttctgtcatcgccaaaaagccatccaaatgtgggtgctgctggctagtattcactggagacccccatgaaaggctgcagacattgggttacactcattcacttcaaaaaccagagggaagtaggagcctccggacctttggagggatcaagaaaggcaggacaccccggggaggagggcaggcctctttgtgtggtagaacccctccatggggcagctggcagaagcaagcatgacaatgtgtctgaaggggtcaagaggaatgtagtcccaggtacgagagagagtatcagccaggttaactactgaagtcttcaaaagtgcttttctggtgccccatcagacaaatctagtcagaacctggaggtggtagacactcccagcacacctgacagggctgcactaggacacatcaatctctttataattcaaggagaacactcacatttctttattccgtctttgctatgtcattaaaccaggattattgtgtctaaattatcaggactagaagtcagttggttcttctgctccttcattgattctttcagtagtgtttattaagctcctactctgtgcaaggacaatcctgggtgccaaaccagcagagtccttggcattatttttgataagaaaatgaagtatctccacttccctaggaaagaagagagtgtgcgtactcgagggcacacacacacacacacacacacacacacacacacacacacacacacacacaccacacctcccctaacgtgcatacatataatgtatactattatgaaagcatataaagagtatctgcaagtcaatcatataaaaaaattcagtgttaaaatggtctgatgacccatggaaggcctcaccctccctggggagcagaaagggattattagggttgggaggtaggggaggaggggagggagagggaactggaattgacatggaaaagaagctggtttctgcctttttttttgctctcttctttctcttatgttctctctctgtgtttccaggggtcgaccactaatttgtctcccttactctctgtcctgctctgttcttccatttcccttttccccctcttgctctcctgccataataaactctatgattaatataaaaaagaagcttgtttctactttaaaactgatctaattacaattataaaaataaaaaaatggtctgatgaatcatattacagattcaccatgaagtgcacaaattcatcagttaccaaagaaatacaaaaccaaaccaaaataagataccaataccatctaatggcagttagtatttctcctatactgatgtgtgcttgtgtgtgcgtgcgtgcgtgtgtgtgtgtgtgtgtgtgtgtgtgtgtgtgtgtgtgtgagtgtaaaaaagaacaactgtcttacaaaatgaaatgtttacctccactatgtctatttactaaagagaaatgtgtccttaaaaagacttgtgcaagaatgttcctaacaactttacttggctaaaacctggaaatgattgtcatcaattaaagaaaaggcacatacatctgaaataaaagcccagctcaaatcagtagaagggctacaaaatggaacactattggaagccaaaatgaatggatggctgatatgtgcaacatggatggaatgaatggaaggccttatgtcaaccccaggaagtcttaatggaaaactatgtatgtgtgattccatttataggaagtcccaaagtaggggaaacaagctaacggtgttaggacagcagctgcctgtgggttgactgcagtgtttctgtcttgataaaggcttgatagatgtttatgttttctttacagaaggcacgattaaggtgtacatttcatgataggtaaggaaacaggaagcacataagatttcagacaggggaaccaccttgctccaagctgatatgtttctgggaaaggactcagcttgtaattacaggacattagactctggtgtcctgtcaacctgtgcacatgggctccaaagattactttgtctcttttggccctgttttctctgcatgtgggcggaaatccagagtcaactcaaactctgttactcttctgtgagtacattgacaccatactgatgccatcccccaaagtttttttcatttaaaaccagttcagcaatctgcaagcagaaactgctctaacatgtcgctatagttacttatttactgtttatttaactaacagtggtggaacttgaaaccagggcctcacacctgctgtctgagaaccctgcaattcagctgctttttccagtcctttggaaagtttgaagcttgctgtgaagtctgaggcggcttagaacttgtcattctccttccaagtagctggggttactggcatgtgccaccataacacacctggcttttaaaagttgcaaaaaaaaaaaatacagcttttatctgtatgtgtgcccatttctgtatattgacaccacatctgtgcagtgccatagggggccagaagagggcgctggacccactggaactggaatgacaggttgtgagccctccagtgtagatgttgggaactgaatacaacccctttgcaagagcaccaaatgctcttatccacggagcgatctctcagctcctgtagttgcctattaatcatgagttttatacattttctttttcactatggcaatgttaaaaaagatgttttcagatggccaggtactgagttcttttggttcagcaaaatattttgcttatttatttccaaaataaatcttgttttgtttttgtttgttttgtttttcgagacagagtttctttgtattgttttggaggctgtcctggaacttgctctgtaggacaggttggcctcaaactcagagatccacctgcctctgtctcccgagtgctgggattaaaggcatgcgccaccaccaccagcacaaaatcaatctttatgttttacaaaggcaaataaataaaatagaaatagatttttgaacgctgcttgaacaacagatgggtgggtggccaaaaaggctccttccccattggaagctttgcggtctccgaagagctcgtggtgttccaagctttgaaaagaaaaatcactggcagcataaggacttgctctacagctctgtaacacacacatgaggagagcaactgcctacctccctgtgtggacaggaagcatagttcatcctcggtgcccgtctaacatggtcacctagcaggaacctcacagctggtgacatacttttattttgggtctcaaagaaaaatcgttcaaaagtccctgtttcttttagatctttgggccaaggaaatttcccttcagcaagcacaaaagtgttgttagtgtggaacttggagccaagcaaacctggattggaagctgcttcatcccttgggctgtgacacacagcaagttcctctggggtggaaaaaatgggatgcctcctgtggctaaggcggttagagttaatgagaaccagctggagacacaatgacagtcagcggtctaggccatccagatttaggagtttctggggtgtgggttctctctggggttgatctggctggcatggtgcagctcttgatcacaccagacaggagaaaggacagcatctaatatgggatcatgaatttccctggcaaccaggatgcagctgctcttgcaggtcagattatgggggctcacccaggaagcaccccaacccggctcatcccaattaaaggcacctcattttatctaatgtgttgccctgattttgcctctcttggagtggcactttgtcaccagaagaggggtaaggcctttgcccaggtcgacttcatgagctcttcagaatccaggtcacacagcctagggggagcattcctctgctgacactccccttcctcctattggtggtgcagaaagaagagagtcagagaaattctgcaacttggggggaggcaccctggatcttggcagaaagcctcagccttgacatagtgtggctggaagagaataacctgagggaaaaacttcaatatgctcataggagggtggggcaatcccagagctatagccagtgccaagccaagttacagtgaggagtgtcgcaaagggaagagcccctagggaatgaggaatccagaaagtgcacatcagcttaagtcaggtacaaaagccgcttgtgaggactcaagaattgttaaaaaaaaaaaaagtaagaagtgcatttgagttttcccttcaccatggtgctccctgcacagtgcaacaaaccacagtgtccctaagaacaacctactggcttttgaactagtgacctcagggctgtttcaccaagctcttgttgctctctggctgctaagtgttcctccagtggaagtaaaactatgcaaatttccttgagaactcagaggcttccctctgacttttctctgccacactccagctttaaaagaatccctataatcctaacatgggaaaagaaatccttattcaaaactatctgtagcaacgttgttgaaaggtcataaaatgagaaaccataaagatgcttgtgaattaaggagattgtagcatctcctaatgatgcctgtgcgttcccacctgaaaatgggtcatgccataggctcaaatgagagtttgcagagtaagttagctttagttttgtctctttagatttattttctatttatttgtgtctatgtgtgcatatgcatacatgtgtgtgggtgtccctgaaggccaaagaagggtgttggatcccctggagctggagttacaggagggggtaagattctgacatgggtgctgggaactgaatttgtgtcctctggaaaagcagcaaatgctcttaatctctgagccatctctttagtccctttaaacttagattttaaaaatacatttattgcataaggctaaaatcaacaacagaaatactaatagcaagcattctatgttcaggaaattttaggccattgttttccatcttgtttctacattctgatttttcagtgttaaattaggattttgtaaccagaaaatagactgctttcagggtttcccagtttgcagggaaaagcaagttctgaggtaaattacaaccaacaggacaatagccatcccaaggcaaacccacagcagataaccctgacaccttagggccagtccctgcacacagagttcctctaacatgctcagtgaagtgctgcaaggctacccagcatttgtaagtatttcacttaatcacactggctactctacggaacctttaattgctacctaagtagtacagtctagtagccactgaaggcaatttttctctgctttggtgcagttaccccccgggggaacattcatttattcagtttcagtcttgtagttactggcggacaggtaagttttaagtgaagaagagtgtggtagtttgaatgtaattggttcccataatctcattaagggtggcgccattaggaggtgtggctttgttggagtgggtgtggccttgttggaggaagtgtatctctgtcggggtgggcttcgaggtttcctatgttcaggataccactgagtgtctcagtaaattttctgttgcctgcactctcagctccagcaccacatctgtctacatgttgccatgctttccaccatgatgataatggacggaagctctgaaaccgtaagtgagccacctcaattaaatatttgctttataagagttgctgtggtcacaggataatgtggtggactttgtagagccctggttgagggctctaccctgcctggggagtagagggtggatagggtggggggtaggtagggtgtgggggaggagggacgggggtgaggggagggagagggagaagggatcgacatgtgaaacaagcttgttcctaatttgaactaataaaaaaaaatgtgttgcaaaaaacaaaacaaaacaaaacaaaaaacagagttgctgtggtcatggtgtctcttcaaagcaataaaactctaagacaaagaacgggtagttttctaaagtgtgtatgtgtgtgtgtttaaggagtttatgtagagaaaaaatggttctaaaggattgtgtgtaaagagaccaatggaagttgataaaggaagttgacagatgaccatgttcattccatgacgggagcaggcatggataccttggcctgagtattgccattttgacttcagactccattttacctgcagggtgaaataaggttcccaagccctaggggacctgagaactttccaatgaccgatcagcctcctccctaaaccactggaatggtcattagcatctttagttctctagaagcatcatggctgctcctaacaacagaaggaacaaatgagcctggttggttgtactaaaaggtttgcattgtgtatcagttgacaatgatggaatattcaaggaagcacccaatctctaaatcccaattggtgaaaattatgaccgtaacttggcaacaaatgtttgcgatttttatgcttataaaccccacttctgcccttgcttgaggttgacaggagcaacaaagctcttggatccttgtcctgaagccccagtgacccacttaggtggagatttattgaaaatctttggaacccataagtgttgtctcctttctcttggagttaggtgtaatgggtgaggtgtgacagacggttttcacaataaagtgtattcactgattttgtccctcagctttctgtgatgtgacagaaattagtattattagatagtaatagattattattaataattaatattattagataataaataataattatcctgagataatgacttatcagggaggaaggtttctttgggctaatggctttagagtttgtagtcatgttgtggaattttattttaagatgtgttacatttgtttatgctgtggaacatttgtttaatgatgcaaaggtgtgttgtattcttttatgttgcatttgtttaactctctaaagctgtgttactttgcctgtctaaaatgcctgattggtctaataaagatctgaacagccaaatagctgggcaggagaaaggataggcaggtctggcaggcagagagaataaataggagaaatctgggaggagaagatcaaggagccaggaaaggagaagaggacctcaggggccagccacccagctacacagccagccacagagtaagaaggaaagaaaggtgaaagaatggagagagataaaagcccagaggcaaaaggtagatgggataatttaagttaagaaagggcagctagaaataagccaagctaaggctgggcacacaagaaagactaaaactccgtgtgattatttgggacctgggcggtgggccccccaaagagctaagagtaaagagttaaaaaaaaaacagctacagtagtccatggtagcctgtggtttcagtatcagaataggtccatacacagcatagcaagtaggtttagttacttcatgaagtccaggaagcagagagaagggaccagcgtcccaggacccccttgggcacagttcttagtgacctagctccttccaaccaaggtcttccaccttcccatagagctacaggccagagagcaaacattttacatctgggccttcaggggacacttcagagccatccaaaccatgacactatttatcacgctaggcagacttccctaaaacatatataaatactcttgaattgggagaaacaaagccacattaggtgtccaggaacaaaaaaataccagtgatgataactgagacaaaagagctggcaactttcttaaaggaatacattaaaccagttgccaaaagaacaattgtgcaatagagaaatggttcaaatctaggatttattaaataaaaattgtgatcaaatgtttaggagaaattaaaaattttttaaagataaaatgtatccttctccccaattcctatcattgagagctttgttgaatagattacactgagaacaagataatgattgtttatttatttatttatttatttatttatttatttagagtcagggtttctctgtcagctctggctgtcctggaactccatttatggaacaggctggcctcaaaactcacagatatctgcctgcctctgcctcctgagtcctgggactaaagtcgtgtgccaccatacctggctgcaagataatgatttaaagaggaaataccctgacaacggacaggattggacttttggaagccaccaataagaaagcatagactgacaccagatggatgataatttgaacactttaaaaaatacacgaatgtattttaagtggagcatctttaaaacagaagatctggggctggagagatggctcggtgattaagagcattggcttctcttccagaggacctggattcagttcccagcacccatatggcagctcacaactgcctgtaactccagttccaggggatctgacaccttcacaccaatgcacataaaataattttatttttaaaaagatttaaaaaagaaagaaaaaaaacataagatctgaaaaaattgtatgtgggggttttacactatttgaccccccccccccactcctcaagttctgaaaaacataagaacatactggagaatcttgaatggcaaattcaggaaccaagcattagccacgtgatgcagggggaaacctgggcactcctctccttcctggagtgtgtgcgctgttagatttcttctgaagtctgcacgagaggtctgtgcagtatacagagacaaacctgataccagctggaagagatgccactgtggaactgtctctaggtggaggactactcagcctggcctttcttatgcagcgttctgcaggaagggccaggctccccaccccagggcttctgttttgagccacagcggtatgctcctatgctctcagtcttggttctgttctatgttctggagtctgcccagttctcagaacacaccctgttgtagaacttgctgaagacccaccacctctggctcaagtctccagatgtagaatctggagccaactgtgacacatcctgcctactgcccactcctgggaaaaggcatagcactgttcctagatgtcccttccagtcaggcatccctgtttcgctgggctaaaatcttctcataaagggtgcttggcaccaattacattgtatgacttttcctagggagacatgaaaaattcctattaagttcagatagggcatggaggataaactaaagaaattttgacaaagcatgaagttacttaaaacattaaaaaaaaaaaaaaaagcccctacagcatgggtgatggctcaggaaactgtatcctggggcaccctgcttaacttgcaggcagctcctagggtgttgctgctgccacagggccactacacatcgatcctcggccaatcctatggtcttagtactcagccgagctgtgtggcctggcccaggcccaagaaggaacaggcttttctggggctggttcccatctctgacaggctccacgacagcacatggcccttgcctttccattggtcacacctataaacaatgccctcagccagtatactttcttccagggagaaatttacacgtcctattgagggtggggataataactcatccaggaacttcatcttcttccttatgaatgtctcatggtcttccatgcttggtttttaaacattcctaaaagctcgctagcacagccatcagtcttctgctattttttttcccctcttagaactctggctcaacataaaccttgctatatttgtgttagagtaaacctagacagacatctttgtctggttggcctttgctcatcttctctgcattgttttggtaccttcaaacccaatttataatccatcccaaatcagccaaagcctttcctaccttgtaaagatcacatctcaccatgggacataggggagccactaaagtcccacagtagtcccaaggcccctgctgaatcaacctcactttcaactatcatgcgcccttgatgctattggattcagtgaaccgggcaacagacattgaatcactcatgctcattccctcaatgcgtgtcctttgtctgttccagtggttctcaacctgtgggtcacaatcctttggcaaacccctatctccaaaaatatttacattagggttcataacagtagtgaaattattcttatgaaatagcagtgaaaataattttatggctgggggggtcgccacaagaggaggaactgtattaaaggattgcagcgttaggaaggttgagaaccactgagacaatagaatccattgtttctcagactgtgatatttgtgggaacctcaggtggtgataaccaagtgttcctaatgattcatttgagccagtccaccaggggctgattccctgccagtaactccggttctacagcctttgtctcaaggagagatgggtagttacagtactcggtatctattttcacagcacatggatcccatctgcacccacgttacagctccacaagccaggcagtgagaggctctgttcccctagtctggtatttcagacgcagggtttctcctaatcattacagttttctggactgggtcattattaaggcctctggctgtgtaccgaatcacgcattttccctccctctgtatcaaaggtgagactaaggggcacctactaccacttctgcctgtcttttccacctcagtatctaattcttcccatggattccaagtttcaggatcccagaaagggctcttagtgcagacatgatttgatttctaagccacccaaccttctttatagcagggctctcttcagttggctttctactgaacttgcaaaggacactcagtgaccacacctgttcccaagactttgctagaaatcccaaatctgtatcttcagatacccaaatgcctagtattgatggtcctctccaaccactgaaacgcacaatcaagacggaactcatcctcttgtctttgccctcccccccttggcgataactcacactgctacttatcatcatccgaggagtcatcctcacacacttcactctgcattcacaaggtaccagcttatctctaaaccttctcaccaagtccagccagttattctcaagccaccctgcccctgttagtaggttattcccaggagccccctgacaccgttccaattggattccgtgtctctctcccttcagtcccctttacagccaaagtacacttgtttccctggcttcaactcctacagtagaccttatggccttcagagtgatcctccatgagcttcatgttgggacacaagccactgctttcagcctttcccatcgcccccctcctgtcggttttattaaacaccccaatcttccttcaaactggaactagtcctgcttcagcctccccagtgttgggttatagaaacatggcaccatgctgggcccttctggtgaccgttccatgaacccctttcttcttcttcttctttttctttttttttgaatccctttcttctttctggatcaggatattccttatgaggcttctaaaccttggccagagttctcctctcttggcatgtactctttctctgcacatttgttcactcattgactaagtaaacacatggcttaaaagctacagccagagtccagtgacccttcccactcacggcctcacggtgtaacttcctcctcttagccccacaggatcctgtttggcctcctcgcggatttctccacccaacctagtttctccttgtggaaaatacagattccgagggccctcgctaagaaacgctgattcagctggtgagaagtagcatccaagggctgtgggaggcttttgttgtttaaactgcaccatcaacaacaaagtgtctcagacaatttcactgctcagtcccatctaggaaagactagccattacgtccaaacgtgggccacaaatggttgtctttaggagtttctctgctcacatctgcctttgaattcatgtgcctggaatagcataggacccaaaacttagcaaatagagagctgaagagatgtctcagcagttaacaagcccttgccatataatcatgaggcctaggcagataacggcaccttctaacaaggcaggcatcctgcaaacagtagaacagtggctccaggaatccactactcgatgctgctctcaccatgtgcacaggcatgcccatacactcacgcgcacacacacatacaaatgaaataaaatttatgagttgggagggggtatgtttgggaaacatgggaggagttggaaggggaagtgagtggtagatatggtcatatttcattgtatatacatatataattctgaaaaataagcatttcttttctttttttttttggtttttggagacagggtttctctgtgtagctttggagcctatcctggcactcgctctggagaccaggctggcctcaaactcacagagatctgcctgcttctgcctcctgagtgctgggataaaaggcgagcgccaccaacgcctggctcaagcacttcatttttaaagatgtatttattttcattttatatgtaagagtgtttcatctttgtgtatgtgcgtacctggtgccctggaggccagaagaaggcatcagatcccccagaactgaagttgcagacagttgtaagctgacatgtgggtgctgggcacagaacccagttcctgagccactgggacatctctccagccaaagaaatgtttttttgttttttttttgtttgtttgtttgtttgtttgtttttcgagacagggtttcttctctgtgtagctttggagcctgtcctggcactcactctggagaccaggctggccttgaactcacagagatccacctgcctctgcctcccaagtgctgggattaaaggcgtgcgccaccaacgccaggcgccaaagaaatgttttaaggtatgtatagctatagacttgaatatagtttatggctaaaaacctgacaaagttgatttatatatgtctaaactcagcaaagggaatacatcaaatattgaaatatttatatggtgattatacatcaattaagctgctgttagaattagtgtattgtatcaaataaataatactaagcaaattttaaacttaagaaaagaatatatagctggatggtggtggtgcatgcctttaatcctaccactcaggaggcagaggcaggaggatctacagagcgagttccaggacagctagggctgttacagagaaaccctgtcttgaaaaaaaaaaattctgataagactaaaattgtttagtcactactttatcctggctgatcaccacttcttattgaagtaaaagtgacttgctagtaattgaattctttacttgcatgatctagtttattaagtaagttgacgagttacaaccctaaataagatactgatagttacattatctttcatgtatgtgaccttgtgcttacacttttgttgtaagaatcatacttttttttttaaagatttatttattatgcatatagtgttctgcctgcatgtatgtctgcacgccagaagagggcaccagatcttgttacagatggttgtgagccaccatgtggttgctggaattgaatttatgacatctggaagagcaatcagtgctcttaaccactgaaccatctactttaaagttaaaagcaaaacaaagcatttattaagcaccagctgtttgccaagaactgtggggtggagcttcagaaagtagctctgacatatgccccttagggtggcctctgagtttttccatcataccagtagtaagtactcagcaaatacttttgagactgtggggattaaaaacaccaaacacctaatcaatttaagttgccagagtaaaaaatatagtatgttcattatgctctttgggtatatttgacactaacagaactgttcatttatttgaaactcaaatttatctagacattcctgtatcttatctagcatcctagtaagggttaacctctcagaaaataaggcctggtcttgcaatgtgttacatacacacaccatctgaatactatagatgtttccctctctgccttgttcgtccatgtttttatgtcactgataaatttctctctctaggaactgatttcaaaggaatgtctttctcctctgatgttaatctgttcttggtttcaatcttttcagtgctaaaaaaaaaaaaatccagaaacaaaaacaaaaccaccagcatagtaggagagcaacccatctggtctttagagcttacttttccacagctgattttgaaactgcagatataatacacttttggactttaggtgtcttcctccaagacttgatatctgatgttgagaatattcagcttctgtataagggcttgaaattagttgcaaacggacttgctggccagaaggtaaatggagtttgtgaaggtgtgtgagttgggtgtgaatgggatcttagggaagagaatgcaacctcagatcccagaaccaccgaattcagactttccaccacagcagcaccctccccctctatcaaccaatgagtaaagatcccccacccccatcctctttttggaaatctgccatgcctcttctggctggcacaactcacagattctagagtggaaaggagtgtgtgaaaggaaaggacaaagttctacagagggcagcctgcacatttttagtgaactagtcagagaaaaacaatctgtacacatatacctaatcacccgtgtcattaatttccacccccaattagactggaaggtctcaaaaaactgctccttattttccattgaggaagcaaggactaggatacactctggactagtaaggatgtagcttctggtcggaggcggcattgggggttcctcaggcactctcgtcactgcaccaagccagtgggacactggtagaactagcaaacttccacactgttctgaaatgctcagggaatgatgcaggacctcgtatcatacagcgaaagcaattgagagtggagaaacattcatgcccctttatttccatcccagaggcttcttgacacccactactttgcctgtagttcctacctgaatgtgtctctgggtgaaatggcaaggcacacgcttctgtgaagattttatagctgaagcaaagcaaaacagtttaatagatttaatagacaaagcaaggcaaaacaaaatatagcttgacatttgttttcctataaacattaaaacaaaagtgctacatgggtcaagtggattcttcaatcaagaaaacaaaagtgaagcaaaaggaaaatttcgttaggtttcttcattctccatgtggtaaaaatggaaccaaaatagagggtgccaaagataccacagcctaaagatgtgccaacctcctgtcaggagccaatccaacttttagatatgctttggaattgggaagccctgcctgagtcagcaaagggtcatctcggattcagatgtattagttaaacatatggagccacttgggagcttcttcctaaagagaaaacatgaccccgggacaaggctttagtgccaaggttagagatgagtctgtggaagctggatgtatcacccgttcagctcccaaatcgtcacacctgaatcctttacacggaacaagggagaaaactgggcatggtagctcatgcctgtaatcttaacacccaggcagctgagacagaaggattgctgggagtttgaggccaatttggtctacagaatgagacttggtgaaagatccaaaatgaactacccaaatcaaaacaaagaaacagacaaaaaaggatagaataacagcaagaacccaactgtcaatcaacaggaagccgaggaaacaaatcatgatgtctatacaacagaatatgatacaataatgacaataaacaagggacataaccgttaaggacagatcttagatgtgtcactgcaagagggtagtcacagaacacatactgtaagattccatttatctacacctcataaacagcctaagcaaataatccatagagtttaaacctcagtatcgactatagtgaactagtcatactataaatgggacctgtcatgggtacatgacagttgctccctggggattctaaagcagtcttaggagattagagtcctacctgaaaaatgtggctcacctctgagactacacctgaaatgatagcatggttcaccatctaacatgttttaagccacacattctttcattgtgttcacacatgcatacaagaggaaactttacaatcgttattctcctagtccagacaaaaatctagctcctgagagggaagaataggaaccaacaacaatagcagcagcaacacattcagttttcactgatcgtgcaattaaatcattgagcaaacctatttttgctgcattttgttgacatgtcctgatacaatatagtatttacaatatagtatttacaagtctatgtggactataggtcaacttcatttttccctgctagtacctagtagacaaaagctattgcatttgaataaatggaagaagttggaaataacttgtaatgacaccatgggtttgagccttcacaaatccacaccaaagacaaaaacatttttaacacaatcctgcaggcacagggagcagccaccttgctctctactgcaaattcacactgctgtactccagtccggtgacagaagccttgtgagccaaggcatagtcccttgcacttacaggaagaccacagtatctaaaaacatccttgtgggctcctgtgtgtctgggtctagatcacatatgagaagctgcacactctgctctatcctcagaacccacagggcaagtgcaaatgctatctacaagctgcgagccttctgctttcaatcctgaatggagaggagaggcctgaagataccttctctttagcagctcagctccattcagaaactttcaaactgcccatgatttcctaagcactctttcttctaatggcttctgcagtcaccacccagggaggataaagagatgcatagcaacatcccacctctaaaatccactctacctgcatctatgtttgaggtagatggcttgacaccagaggtgggaattttcttcacttttttaatgcttgtttgtagtgagcatttcctttcttttttttttgaaacatttttgagtaccatatttcatgtcttttgtccaataaagtgattttaaggacttaatcctaaaatttcaataaatcccatgtttttgagatggacaatcttcccagaatgaacttgaactttttttttaacttgaaaaataattaaaaaacaacaacaaacaaacacaatcatgctatgcagtcaagccttttttgaactcactatgtagcccaggttgtccttaaatttgtgattctgttagcttttcagcaatgctggtctagtgggtgcgtgattctagcggatcgagagtgctaccctttgttcttctgtaaattgagcatcaggctatcctggccaacgggaagttcagatcctttcttggacaaacgtcaaaatggaaaacagatatggcatttattgataaaaatacaagcctgaaattcattgagtggacaaggtaaaaacagcatttgaaaagcacaagacatttatactacctccccccattatttacatagatgtcaagtttttctgaatgcttgattgaatacacatgtcatgaagacaacaaatagagagtggactaaactggaagatgaaaacctgaagggtaaaatttcacgccaattcttttaggtgaagcagtgcagttggttgctgactggtaggaaataaaactttattaacagtcagaaactttagagccagccctcccatcaatccctatagaaagcaggagaagttttgaatggctgtgaagtaccatgttaattttaaactgaaatatgatggctcagattgctaaaatttcaatctgtaagtaaaaaccaaccacagatgatgaagatgagttgagtcagtgctttgtggtgatcccttgttggtacaaataaagcacgtcggaagatcagagctactggaacttgcccctagctaaccatagaagtctggaggtctctacagacaggaagtgagatggctgggcagacaaaggattataggcaggaggaaacaaaaacttgctctcttttcagctgggaagttggcgaggcaaggtgtggctgtgacttgctccttcatctctctgatctctcagtgttttcccctacatctgattcctggcttttattactgagacctattagaactcacactacagtgcttcacaaaccagattcctcatatttgtccctgtgatgttcctgtgctttcttggttgggaaagggaggataaggcacggaccaaataagttggctttgttagctattttactgtgctgcagaacccttgtgtagttcccgcacaacagctccacactggaaacaacccagatgtctatcaacctgtaaatggaccaaaaaaaaaaaaaaaagcctgtctatgcaatagtgtcctacccactatacaaaggaatgaggtgctgtcacttgactctgtatgatgaaccttgaaaatatgctcagacagacacagaagaccacgtatcctatcatttcactaatggaataggacaatatctggagatgaaagtactggcggtttcttgggtcttagctcaggaatgagagcagtggtaccaggatctggggacttgtggtttgatagacaggttctgaaatcaaggcagtagctgtggagctctacaacttttctaggaatctgtggattttctagttagaatggtgtgaaaattacccctcagtgaagctgtctttaagaaaactctcttcggtgttggggagagagttccactggtaaattgattgctacacaagcacaaggacctggcaccttcataaaatgtcatttgtggtggtgctggtaacatccgggctaggaggtggaggccatagcataggatacttgctggctagttagtggagcccagtgtgtgaagttcaggttcagtaataaactctgcgtcaaacagtcagtggcgagcaaccaatgaagacactggatgctgacctctggcttttatatgcatgtgagcacacatgtacatacatgagcatgtacacatagacattgtacacacaagtggtgactgtcaaattaggggactggagaaacgactcagtaggtaaagtataggtaaaagctatacaaacgtgaagacccaagtttatttctcagcactcatgtaaaaactcaggcacagtggcacatgcctgtcggccgactgctaggaaggcagaggcaggaggaacccccggggcttgctggccagcctggctagccaaatcagtattctccaggttcagagagagagatcccttctcacttatagcctctatatgcacatgcacacatgtctaggcacacaaacatggacacaccacacacacactgtcgtgggcatgtgggtgagagagacccacaatcattgatgaaaggcatgagagactagctcattcccctcttttatttagaatctctcaaaattcttataaccatcctaaacgttgaaattttgactatgcctgaaatcatacacaattcgtttccactctaacacttagtttcgacattatgactcctctcactgggaagccttctgtcttgatacagtggtctcatgatactgagccatgctagcctcagtctgtcaatattccatcctctgcctcccaagtgctgggattacaggtgtgcacccccatgcctggttgcctggtgatctctttaatttctgtgtaagtatgagttcaagaattccaaagccatgtctagatttcacagcactcatgagtgtacaagttaggctctaagaaatacacagtaaataaatagaatattagtcacccgatggaagactctactgccttgtgtccccatctcagcactggttgtggtgttcctgaccattcttgcttgtgtggtagcatggttagaagctacctcttccctagccagtttgtgaaagttataacaactttccaaacattagcatctcccccaacatgggacaaaatcagtaacagggacggacagattctgagcacccataatttgtgtaacatagctgcataggtttaactcgaggcaaaaggaaacatacatagaagaatgtgcaaagtggaactctgtttaagagagttcaaaatggtcacactgagcaggagggcagcactaggaagctactgtatttccacatgtgggtgctggttatacaagcacgctcacttcatgaaaatatagtgagcagtatacttaacgtttacatattttattcatgtatattatctttaaatcaaaagtcataaaatatgggtcattggtgcaacaaaaacagggcatttcaaggtgaccccggagggacttaacaccttcctaacagggtgccaattcatcctttaggagacccaccatggctcctactggcccaccccaaactgtgaaacagaagcccactgtattccacggatgaatgagagcctgttccagccacacacttcgttagccaggtgccaaagccaagactgaacctccaattccaaatttgcagttcagactcacaaagcacagacctcagatggatttcagtgtggcactgagctagactgagatcaaacatgggagacacactccagtgagaaggaaaataatggtgccattcccaaacccggtagcctaacaaagccttcggaaagtgccaaggtgacatggtgacagctgcagttgattataagaaggtgtcccagtgactcgttgagatttctaacctcagcacaccaataacctgtccttgaaatagtgggccagataggaaaattgaatttgtgaccatagtgacctttgattcccatctgggttagagaagcaaaatccagggccaatcatctaattaataagaaataggtacaaaccccatacaactccactaagagccataaggcactgagttacttttagcctctaagctttaactacatttgctgatgtctgtatatgaaggcactgatttacagatagaagacctagagcatatcgtgtccctgcacgttttgtgagtgaggctaactgccacttagtctgtcttttcagggttcaggttcaggctgaggttgtatttaggctttccccctgaaatgtttatgcaggcatgtgaatgtctgttcatgtggcctctagggaggctgcagacaaagaaaggacacacgttgggtgatcataatgcttgccaggccatgagcaataaagtctagtgtttctgactcagaaacttcagattttctgctggcatccatgagactatggcaagtttaattgggaaaggagtgaaaaatctcagcttcctgccttattcttgctgaactaattgctacctatagggaagggggaatttgtgccttcagttatatacgcactggtgactccatcagtttccaatgggtagttccaatccaatggtctcagaaatggccttggttacactaaacaaagccaaaagccctaaatttggggaagggacagataggcaattgggattgatagaggttggaggaagacaagagatggtggggggagaggagtcagctacattatagacatgcataaaattgtcaaagaacaaacctaattttaaaataaaatccagagactgctctacattcctgacagtatccattatcttggtctctccttataagtttccttataaatacattatacataaaaattatttgtatgtataagctgtttttcttttctttttgtttttggttttttgaaacagagtttctctgtttaagtcctggatgtcctgtaactcactttgtagaccagactgggtttgaactcacaaagacatgcctgcctctgcctcccaagtgctgggattaaagacatgggctcaccactgcctgacattaatttcttttctctacatactttttaattctctttgaagggtaaatctacatacattactctttgatggaagtaataatgcagttaagtttaatccatatctttctagagatgttaaatggatttgtaaatgtattttctttttttgcccaaaatgttacttgactataagtatcattttacatcttactaaacaaagtgcttggagagccagcaacattagcatattatgtcattgaatcatttttaataatttgaaatcaatctacaccatgcctatattattacagggacatagtctagagtacaatcttcctattcattgacgttcaccttgcttctttcgtcattatagatgtcaaaggtgttcttgtgcatatattatcaagcaacgacaacagtaagacagcttacatgcaagatctttatttaaataaatgagtactagaatttgagttgctagcttaaagaacacgtatgcattaatttaaatgttgacaggctgtgacggctctactgataatacactgttctgcttgggcgtgtcccaggactctcctcagagcctctcctgcacagcacactggcaaaagcctttaactttgcccactgagaaacgaaaagcaaatctcttactttcacaaattcatttcttataatacaggagactgggtagttttcatacatttggagccacttatacttttctaaagctcttattttccttcattaaattttttatacattattgtttatttacttttgagatgggatcttgcagtgtgtcccaggatcaccacaagtttgcagtgactatccttcttcagcctcctgcgtgggtgtgtggcactgtctgctatttatgcccttgcctagatgtatgcattagtttgcatggtttagacagtattggtttaaaaggcttttgatatttttggaaaatagccatgtcttctaggagctgcatattacttcccaaggtacctatccattgattttgttttgaaattttaatatctaaaacctttttattgcactcatctgtgtcagtgtcagagtacagcttgtgggagtttgttctctccttccaaaaaacgtgtgtcccagggatcaaactcaggttgtcaggtttgtcagcaagtgcccttactctgagccatctcaccagcctctaaaatacttttatattaaaaacacgtgaaggtatctgagtgtacatcatcaccgttctgagacaataggtacattttctttctgcggtactgtgttatttttgtgcttgttttaaaacttcgttttaaaatcggttcttaaaattcttatctatatttacaaggctgagcatatcttcaaaacaagattattttctcagctccatggatgtgttttttaaccttcatctttcagttgttactgacctttgaccttagagacagcatggctcaaagcccggtccacaagtaaacatagagtgttaaccttacatagtgaatgttgttaacctacagagacagcagtaaccatacttccagtggtaactttatttttcttgtcgttactgaagattgaacctggggctcatgataggtgaaggcctctctctgcctctgagctgtctcctcagccttccagtaaaactctaaaagaacttttgccatacaaaaaggtgttattatgttgcttacaacaaggcatatgagccagacaagacagagattccctggggaggcaatttccctagttatttgtgttgtgtctacacagggctgtgaagaggcttggcgaagaatcacttttcctgtctatccacccgagttcctatacaccaagcctattcatctcttatttctggtcccaagtatcctgacattcattttccattcagagagttacataagaaaatgaaagagaaagcacaaatttaaaatttcgtatacacattcattttcaaaatagtataactaggggacttcagagatggcttagcagttgagtgcactcactggcagctcttccagaggaccccggttcaattcccagcacccacatggcagctcacaactgtctgtaactccagttccaggggatctgacacccttacactgatgcacataaaatgaaaaattaaataagattatttaaaaaatagtataactaaattcacttcaaaataatacgaaagggggaaaaacataagaggaagctgctgcccacctccaaatgcaaataatcttacagagcagaaaacccaccagaaagaatcgagacaaggggctggagagatggcacagtaattagacttcctgaggacctgagttcaattcctgactctgacgttggatagcagctcgaaaactacaactccagctccaaggtatgatgcctcttctggcctccattgtctctcttacacacacacacacacacacacacacacacacacacacacacacacacacacaaatatttaaaaaattgttataaacttggattatctaatctgagtaagccacaacacgcatctgccctttggtttattcatacagatagtcaataacctttatgaagattacagatatgtaaggtaacattaatttttaatcctcatgtgataaagttaacaaccatgaacaattaaagcaatggcaggtatctgtgggtttggatgaaaagatacaaagattataaattaatttatgaatgccagaattaaactaactcagaggaaagataagctcacctttggaacattcaggtctgctatatgtgctaagagaattcttctagatttgttcctgatctcacagttatgggttaatagtgagatcgtgcacgttaccttgtaaatagtcacagctactcacttagagtggtactccattgtcacagaataggggaagttgacagggaatgactcaaggacagctgatgagcaaagagtgcctttggtcatggcaaggaaggacagggccagtttgggaaagctccagctgggtgttcagtttgacattttctgtgaggagcgtggtgactacagaggtctgcatcggctgtcaaacgcctgagagattttggggaagggaaaagaaggcattctgagggagaaagaagccgctgaccattgccttgctgggccctggcatgccatggagcttcccttttccatgaggaatcaagccaggctggactgaggaacttcctcatgagcttttaaagactgtcactttgttccaacacagaccagtcctgtcagataccctggaaatgggatccagactttgtaggattgaggaacacaggccataacctctgctctcacccagattgcaggaaagtaagagacacattcagatcacaatgaatagttacaagaaaatgcactttctaacctatgtccataacacataacaatgagcaagcaattagtgtccagatgaacctcggcttctttgtgcatgaataataaatacacttgactgaatacaggcacaggatgatatgaaaggcattactgaactgtaccagcatttgtgtttcttaccaattccaaatctaagaaatacatgcatggcatattttaaaaatccaaaacagaaatacttttatttttgttttttaaataatttattttaactctgggagctggagttacaggcagttgtgagctgccacgtgggtactgggaattgaacctgggtcctctggaagagcagccagtgctcttaactgctgagccatctctccagccccacagaaacactttcaatacaaactataattcactgtgaaatgataggtatttaatttgtcactggaaaatattgagcaccacaggatacagggcaaggggatgtgctaaaggagaggaaaaggaaattctaaacaattgctgccagtagcaccaaaactgatgactatgaaggcgatataattcaactcctataatgaagtcatgtgaatgaggccttcaaaagtaagggccgagagagatggctcagtggttaggagcattgattgctcttctagaggacctagcacccatacgagggctcacaaacatctgcaacacaagttctaagggatccaacgccctctcctgacctacacaggtactgcaggcatgtggtgcactgccgtgtatgcaggaaacacatctatacacataaaataaaggaatttttaaaaagtaaatcaagctctcactcatatgatctggaatcatgaagttcaccaaatggagcaagggtttttaaaatgcacacccaaggtgctggccttatcaggggtctgtgaagccctgacattgtgtgtaaagcacatgtatgcccatatgtttgaattccttttctgaatcaggaatccctttgggaggtgggggttgaggcaggagggtctcatttgaaactcttacaggtttgaagctagcctgtaagataaaataaaataaaaccctgcctcactaaaataaaaaaacacggtgctggagagatagctcagaggttaagagcactgatggctcttccagaggtcctgagttcaaatccaagcaaccacatggtggctcacaaccttctgtaatgaaatctggtgccttcttctagcatgcagggaaaacactgtatacataataaatgaataaaatcttaaaaaatcaaacaaacaaacaaacacaaaatctttgttagcctcagacctcttcttaggaaaacaaaagtttctaagtgcattaaagcacagaggattgcaacacacaaaaactgagttacaattatctaagtgtttcaagttctagcccggtaataaatatacttaatcaatcagcattaaatgacaagatcttgttgcctataaagagagttatagcaacaatcttaaagagctgtactgataaagagctcagatactctgtagtatctgcaacagcatttagtgatacgatgtacaaacatctgtggtttctattggcaacatggttataaatactatagtttcttgttgctgcttttagtatgttgaatttcaattataggtgtaaaatacactctccccttttaagtttgaaatgctgaactctctggagtttagtgaggaaacttggtcctacatcaatgagccctcttgaaaagcctccaagagggtgggggacctagccaagaggcccctgctgctcaataacttcatgaactggtcgttgaccctaaagatggctacagaaagcaaagggctcttggacacaggacagcaatggaaggctcttcggagctctgcaactaaaattcatatgcatttattattcattttgcacacttctagtgttctgcataattctttaaaaatgttcagcaaagttgataaatcagaggggaggagacaaaaagagaaaacaaaccagggacacaaaatgaagtgtcactaaagctcacgaacaccaaagacaaagtaagccccgaattcagctctgggcagcagcctagcatgcatctggaagcaaaaacctggggagtcacagaattcagaaaaaaaaaaacacacacacacattaacctcttcattaagactgacccccgacccccatggatctttatagaaataacactttacaaaatgggctggcgagatggctcagtgggcaaaggcgtctgacccaagcctaacaacttgagttcaagtcccaggacagatagtggacagtgtgaactaacacaacttgtcatctgaactctatacatgacaaagaacttcatgcaccccataaacaaccaacaaataaataaataaatgtactttaaaaaagataatcccacagatctctacagagagaatattgtaattaatgaacctgaacaacactaacaggaaacaggaaaaaggttcataaaaattctaaaacagcatatatctttttaactaatcaaaacagtggcaatgtagcaaggctgataaagtccagctctgccctcagctctccaaaggcagccgtctccagctgagcactaatgtcctgtaggcctcctcatcagaactgaacacagaacccccagcagcccacagcaggaggtggaaaacacttcttgaggtatccaacagcatatgtcctgagctttgcaggagtcacagatttggtgacaaactgcttggagagcagctgtggctatcttaaaatgagcatcctgtgtgccaacgaggtttatttatagacacggaaattctcatttctcacatgtctcataagctgtgaatcatggaggaagcccctctttgatttttccttaaaccttctaaaaataaagaaatactgaggccaccaaaggaagtaaggggctggatttgaaccacataaaaataagcgtcattaggtgaatcgatccacgtgattataacagtttgcaaccctgggccttctaaagaaagccaggccatttcatggttcacttcacgatgaacttaagtaccgataagaagggcccttcattatagacgccatcctgatatctctagcttctctctgtctgagaggaagtgtaggcttctatcagccggctatttgcttcatctttttaattcagtgtcctcatctatgacaagtgatctcgaagtgaacccttcacagagagctgcgggggtaactagtaaactgcatgaatagagccttgacaagtatgatgaaaaaaaaaatatacccagaggaacccggctctaacacaaggggacagttacccctgtggaaacacaatacacttcaaattgaggctcctgaaatgtgtgactccctttgcacagagggttcaatagggatcagagtggcccccaacactcacctctgctgtaggctgtattgtgttacctctgtgtatttgcttaagttttgttttttttccaattggttctgttaatcaggctgtgtatatgacatgggctccttgaaccacataagattacaattctttgctgagcccgggaaatgccaatgtaacctccaggacatcccagacaggcccagagctagttggcttttgggaccttgtaactcatgaatgctcaactgtaaagcacttacataatgaacaaggcaaggtctagagttacatgtaagttgcagcagttatttggaagtacacttattcttgagtacatgcattcattcacaggaacaataaagccttgtactactaaggtgaaatggtgagtttgagtccaaagactactgtttccaaacctagccaccgggccttatccaagctaacatttattgccaattaatgacatttgctaaaatccacatcttctgaagtttatacaactttccaaatagtccctgaggaaaatcattttctgtgtgaccctcatctttgaaatgtcttgacttcgttaatctgtatccacaaagacaaaattgaaatgtgtgttttaaataaccaaatagtatccattctcacaattgtagtgtcttttacatctgtcctattaactgggagggtcgggctggttgaaaacagaacaaatgaatctaagaatgccaactactccacagattacagtgaggaagagctgggacactttatggaaaggccctgtacaaatgttacggcccttctcctacttagccaagcccatcagatttgccatgtgcccttccaaatccccagggagtttacattctcaatggacttaataacacaagggatgtccacagcacttcgtgtcaacactgagggggaaaaatgaaagatgttaacccacatttcctcatttacttaatgtggctgtaccaagaggatgcatccttctggtagacttttgtgttccattgtgaattcatgggcagtgaaagtcaatgtttacacagtggccactattcctttcatttaaatagtacaattcttctccagcaaaaactccagttttacttcctgcaatatactcagccacttccctctacaacaaactcttccatgctcttccacagtgggctttaaggagtgggaacttaggccagccttgcgatgcggattcagtattgacaaaatacttgaacttccctgtactacgctagaagaaaatgatgcccccaaatttctcttgcaaacattacatcagatgccttttacaaacccgtgacttctagcaactcttcactgcttcccagtgaaatggaaatagatctggtggcctgaactcttaagccttgcattccggttgggtcaaatttttactgtaaaaaaaaaaaaaatccactgctggtctagtttctagtttccttttatcatctataaattgtgtttggctcacttattgccagctttcatggaaactaaccattctgtccatattccccgaatactagcaaagcagtaaggctaagccataaaaattactgcccatatctggaaaatgtattcagttctgccaccctgagaaaggagatgtgtctgatcgtgggaacagaatatatccactcatttatagcatttactcttttaaaaaagtgctgagggatgccttttaatttgaattcattattattgtcttgagatatcaggggtaaatagctgccaaaatattgttcaatgaggcggtaatatatcctaagttatctgagccaactgggcttgctacttggcatggggcctcactccctctgtgacattaacaacttaattagggagaagctagcaagctcttagctgcttctgtgagtggctctaaagaagtactcacttcagctgagtaagctccctctggactgtttgtcatccacttgctggtggcttggtaaggactgagcgaactaatgtgtacaatgccccagtattggtgccaggtaaataagtacttaataaatactggttaaaaagatagatcacagcagaggcaaattttgtattgtcacaaaacgtgttcaaaaagtgaaactccagataaacatgcagaccccatggttaggattatccagcttttatttgcatggctcatttaaaccaagggatggatatgaatgtttttctttttcttttgggtagccactcaaaacactgtggtaatagggacccagtggactgagagctgtaattactgatataaatgagggggaaaatactctttggggactcagtgaactaagcagatatacccaggggccttgtgaccactgtcatcaatttcctgatgcctattgaacctgggaaacaacagcaatggatgggtaaacagatgactctaatcagaggtttaagtgtatacctgaactcaggccagcttttgcctagtatgattttatctgtactgcccatgaggcaattctctctctctctctctctctccctctctctctctctccacccttccctttccttccctttctgacagggtcccaagtattccaggcgtaccttgagcttcccaccctcctgcctccatctcctgagggttgccattgcaagctgttttagcgccaagcccagttttgcagcactgacacaggggctaacccaggacttccaaatgcttagcaagcactctagtaactgcactactagctctgataccttttttttagatttaaaaaagtgaaaaaaaaaaaaagcaatccaaaatggcttgagagggtttaaggatgtgtgaatatactttttctaaagacaaactggctcgaatattttggcattgccaaaccacatctttcaaatactgtactttgttctgtatttctatctccagaagattagaacaaagtgctaaccttgagtggggaatgtatgtgactcactcactgataaatcaatgaggagataatattaatatttatcttatttataaaaaacatttcttggtgactagaagtcaagacaaaattgtagggagagggtagggctactttcaaaggacatatgataaagagaaaagtactaggcgtatgctgtgtagtcaggattgcagtctaacgtgatgtcaccaagatggctccaggagctaacaaagcttttgattgttgtgcatcagctgtaatacaagacattagaggttgatccttaattttctgtaatgttattattccttgaaaacacacacacacacacacacacacacacacacacacacacacacacacacacacacagtagctagcttaagttttgtttaggacagactgagaagattaatgagattctgtctcaaaaggtaagaacagagagttcagctcagtagtagaaattttgttttcttaccctgcatgaggcattggattcaatccttcacaacacacatgtaaaatttaatttagtagaaagaagggttaaatatataaggaaagtcagttggaaattattgcttttcattcgagcccgctgcagaactcacggggcagaaggctcacaggtcgtaaggattgtgggtgaatagggtacaagcatctcacttagaaaaaaaggaaatgccatgtttaaagtagacgtaggccatttggatggactaaaatctataaataaggaatgtaggacttcagttgctagactcaattgtggcaagtggagttcctggcttagtcatgccatacatgtttgcttagtcagcagacaaatacataaatgagaccttgacaggaacctaaaagggacaggataaagaccttgggagaaaggggagccatacacagaggactcttcagcagggaacttaaaagaaaatcactaatttttaaaaaatattttggcttgtgtgtgtgtgtgtgtgtgtgtgtgtgtgtgtgtgtgtgtgtggtatgtttgtgtttgtgtgtgtgtgtggtgtgtttgtatgtgtatttgtgtgtgtagtgtgtgaatatttgtgtgtgtatggtgtatgtttgtgtgtgtctgtgtgtatgtgtgtttgtgtggtgtgtgtgtgtttgtgtgtatctgagtgtgtttgtgtatgtgtgtgtctgtgtgtctctctgtgtctctttctctctcttctctctctctctctctctctctctctatctctctctctctctctgtgtgtgtgtgtgtgtgtgtgtgtgtgtgtgtgtgtgtgtgtgtgtgatatgagcatagttgtccatggaacagaagatattgggtgccatggagctataggctgttgtgagccacctgatgtaggtgctgggcactgaaagtggctcttctggaagatcaacaggtatttctaacagctgagccactgactctccagccccatcatgaacctcttaagttgctaggtttattggaaattgtgaagacataaattgtccatacatcaatcaacagtgattggagcagggtatagatacaggctaagaaaagtaattgtagtgttattatgctgtatatagttgcttggttgattaaaattatatatatatatatatatatatatatatatatatatatatttggtgacagggtctcactgtgtagccccgcctgggttggaactagcttgaactggccttgaactcacagtgatccacttgcttctgcctccagagtgctgtgattaaaagtgtgcaccaccatgcctggcaaaattgaaatattaataatgaaatatgtaaagcatatattggctagttagataaagataatgctaatccagcatagaaatgaacattatgaatgaagcagcattttatagactacatttagataactgttttaggaacatttcacagcagaccacgttattttctttttcactaccaacgctaacatttgtactagacaaagagagcttagactgtagttgcactttcacaatactgattattggaaaccaacttcagcagcaaacttgcaaacacaggaagagttgtcacagccaccagggcacactacatacaccaggcatcatcaggggctagttacataccttgcacttttgcatggaaagagaagaaagtttcctattaggtacctatttatcctaaattggggaaaatagtgattggggaagctggattgtgaaggaagagcaaatttgtaataaatcctaggtttaagacaaaccagtcagccatctgggaaggttttgtttaatctttattagaaaagaggcaatgggagctcagaggacaaagtgacacagagaaggagtggagctgggctcctccgctaggtttggcagacaggaagaccattggcttcaggtatgctgaagggttagggcattgctgtgtttctgatcttacagggaagagtcctctgtgaatgtcaactgtccccagtgctcctcagagtcccagcacagccacaacagagcagaaactgccacctgcacccctgagcatagtgaggaagtgtcaaggaacttacccagctccacctgctttccctagagtcccagggctacaccagagcaacacagtggtgttacaggctgggagaagagaggtgttgaaactgatgagatgacaacacgaagagtatgtcagggaatgcacatctctaagaataaaggccaccaagaccaccaagactagatggacaaccccaacccccagatggacaaccctcttttcctttgtagaggaaagagaattcgatttcctatttctgactacctagctgactgaaggtctctggtcatggagtatgcccttttaagagtgacacggtggaggaacatgctggggagatgactcattggttaagagcacttgctgctcttacagaggaccagggtttagttcccaacactcatatcatgaagctcacaactgcctgtagcaccagttccgggggctctgacattcttctctggactgcacagacatgtggcatatactcacacagggatacacagatacacagaaataaaaataaaacaactcttttgtttgtttgtttgaagacggtcacaggtatgctcagatgcatgcaggacatgacgtgttagtgattattggagttgagaagaggcaggggcatgtgtctccagcagtgatgagttagctgttaggtttcaaagctgggacaaatggcttgaggtgcctgcatccttcagtccctacccgttacagggtcctcctgcctggatccacccacccacctacccaccccggaaactctccagcccagggggctgggctgctcttcctatgtaatccaaccattttggttattcaacctctttgtacctttgggcctcctggctgccgcacctggtcccccccccttctctctcttcccctcctcctcttcccacatggcacagttcagtccggttatgtccactctggactctgactacactctcacaggtatctccaatgaaccttcccctccaccatatctaggagaggccgtgttcctttcatgtttcctttcatttttattgttttcattcattagccttctatagataataactgaaagtgcttgttacagtgtaaaacactctaattaaaaacagaatatagatatggaatggaaagaaactaccaggctgaaatctggaacaaagtgggaacccaaagagcaagtttgtgggcacttttttcctcatggggcgtatttgctgacaggaacatatttgcactaattgcagcagcctcattagcagaaatagaacagaaatcagtgtgggacgcatgcgtaagacccctttcctgttacaaagggcttctacgagttgtgccctgaaaataagggtgaaccaggagaaagccaccttctagccctctgagggcagcaatgctggtgtacaaaaggcgagctagggtgggcagaacttcttgtaaaggctgcatccacaaggtaggccttaggtgcaaactctaattcataccacctgggtggtatttcgaaaagactgaggttatgtcctaaagattgcagaccaggagtgaagccaggatcaaaagcaaattcttcctggaaaacggtgtgcagcttcaaagtctcttgggaaataatttttagggggcaataatgacaaatccctagcccaaaatgagcaaatatacaagaataaaacaaaaagcgtcaagtatcagatctactaaaaaagcacattttaagttgaggccctgatgagttttgtagctgtgaattctttcattctacatggttcgggcactttctgtgggccaagcagtattgcaggtgctgggcacactgctgtctcggctgtcacatgaacaaattgcctgggcactaaaggtctggggacctgccatcttattaaagcttatttaccttgactttctgaggtctctagggagttacaaccacagcctagtgggtgtccttagtgtttagtggcagagtttgaaataaacagaagtctcttagggctgaagttgacatcactgattccttcctcagaatctcattccccaaggttccacggttgagctaagcctaattatgctcgaagaaaaccatggagccatgcatactagcaggaaggtgataaaagacaaagatagctagctcagagacataaacctcaagggtaaatatctctgagtttgtgacggtccaagcaggtgacctattattgcaaatcatagcatgaactggaaaacattgattttgaaggttcatctggaaatagtcaaaggcagaggaagggtggaggagagttagaccaatatttagttatacgtggtctgcttgtcttcaccagcgtgctagccaaaaataccaatagtacaacatttgacttactgaagtgtgtttgtctacccaggttttcacagggagtattcaaactgtagcccccatatacctgcatttgtttcctcttgttaaacattctagcagttgtcatttactcagcccccagtaacccgtgctttttttagttatgccaaaccacaacagtacagtctaatgctaataaagacaggagtcagctgcgaacgtggcacagacctctaatcccagcattcagaaagtgaagccgagaggattgtgagtttgagaccagcctgggctacacaataggatgcagtctcaaatggtaagaataattaagtcgctcttatcccattttacacatgagaagacaatagtcgagaaggtcacttcccaaagcaggtgcagaagagcctgactgttagttttaccggttcaacagacctgaagttaaaaacgtgctctgcccacatttcttctctcctggagatgaggctcagtaactttccaaggtgagggggtgctgtggggatgagagaaagcctagtgtattggagcacacagctctagctagggctccacccagagattcttcatctacacattcatgtcttgacttaggcaatgtcttcaactggttttaaaagtagctacttccaagaaaataaagcaccaatttttgaataatgaaaatgcaaaacattgctagagccaccgagagccctcagggtcttagtgacccttgcatgcattcacaacacctacttgtttcaccttttagaaaacaacggaatagctcagttgtaattttcagttgccagagtatcacaacataatctgttcaagaagagagaacatggcttggccttcccttctttgctggtctctcagacagcctgcctttccttccccaggtatctgtgtatacacgggatagggctagagattagccagaactagagttaaggtcagaagagagatgtgactgacatctatttctttgtttccatcgtaaagatggctgatacagaaggggtggacgactttcctttattaaaagaagattggtttgttttctagagcttatgaatcatcttcatgcattctttcatttagtctttaccatttactggtcctagactggtataagtgtgaaagacaatatccacacagtaaataggcagaaactttgaggaaaagaaattttgttgggctggagagatggctcagaggttaagagcaccgactgctcttctggaggttctgagttcaattcccagcaaccacatggtggctcacaaccatctgttatgagatctggtgccctcttctggtgtgcagatatacatggaagcagaatactgcatacataataaataaataaaatctttaaaaaatttatctaaaaaaattttgttgttgacaaaaatttgctaatgcaatattcaggttactttgttacatccttacttagtcatcagcccatgtcttcctctcaggttttcacactcaccaccatcaggcacacagaaggggccccacaaacatctgaagttattggggtggctgctatataaatccactgtcctctactgaccagaaatcaaaagcgacataaaggtctcttcaagtccatgaaggaaagcccttacctagtctgcctctgatgtggcaatacttgtttcctaagtaaccgatgagttcagaggtcacgtgtggaaaggttttgttctgtaaggtgtcaaaacccagtttgagttaacattgacagttaatttcacgtgcacccacagccagcctgtgacaggactaacagcaaatcctgggccatttgggaatttgggatagttgttggaaaataactgttaggctaagggaaagttgggaaattctgcttcagttagctcttgggtattaaatgatcactgcctcagaatgaagaagaaaggaggaggaggagaagaaggagaagaaaaagaagaagagaaggaggaggggaagcacaacaacagaaaataaactaaaagtttcaaattgtgtaaacacaaaaaccaaatgcttgttctcaaattcctccctggtaaccgcaggctccaggaaaaggccctgccctcagccccgtgcttcacagactctttctaactggaggtgtgaaaaggagagttcactttctgactgatgcttgacaaagttcctcctaggaactggaagttcttgaggcaagtgaggaggtgagactaaaatgcaagcgacataaaaaaacaaaaacaaaaaccaaaaaactgactgctacagcagaatacagcacttggcacctaacaagactttgatcaagagatgcaggagcacaagccacagtcacaaaacacattacataagttactgagggtcccactactttgaaattacccatcagaggcagctggattccaactgttgtcccatcccatcgtgatgccaccttcctcctggacactcttcctggtccagtatgtccccccaccccaacgcagagcacccatatttctgattggcacgcctccagttcctgtctgactcctctactctccttttcacttgtccagctctcagcaacactctattcctcaagtacactcgtgagtagcaataataccaaccatttattgaacacctactacacgccaagtatatgtttaattgtttgaggacttcccatttactcaccgccacaaccattggaggcatgcaatgtggtggttagtggtcagtgttcagcagcgggttagctgggtgggattttatttaaggcttgtaaaaagaccacatctgaggtgacccaaatactgtctggaaggtttcttctaactcagaaactatggttactactgctttccctccacttttattggggcacagtgtcatttttaggaatgcaatgtcaattttagagttgttacgcggcaaagaaactttagtatgccctcatctttccgtgaaaaggggaactgcccagattcgctgagaaggaaactgcagcctctggaaaccctcccctgattttccttatcaaacggagctcccccacccccatcgcatgccgatagggagataatcacacttgagggttaaagcctgccggtatggaaatgcaatttcttccagttagcctagataattgcagttctatgaaagtctatcattagtccaccccaagaagggtccaaaagttagaagaaccccggtggctgtcgttgacgcgtggccagagatcagacctggcagaagctcagcccaccacccactctgcgcgcgcggaggtcctgtggaagacaggggggtggacagagactggaggcagaagggactttccttctaccgggtcctgttttctggttgggacccacttcgcaagctcaggagggctctggagggcagggattggcggttcccagaggcacccggcagctaggggctccccgagcgtggcccggggaggggagcgcggatttcgccccagtccctgcacgtcaccgggcacccttgtcttccctcccggctccggagcctcccggggagggcgggacccactgcgagtctacagggcaggaggggagggccaggcaggcggctggcagcctaccgtcttctgcttcttgacgcccgacatgctgcggctgtgacggagcccgggtccagggcgcagagacgcggatggcggcggtggctgccgggctccagggaaggaggtataaaaaggctcctcagacacgtcgcacttcccttgaccggcccccttctcctactcctcctcccgccgcgctcctctccgccccgtcggctccgccagcagcgcccagccccggggacccggcagccgccagggcggggttccccgctggcatcccgccagctcaggtctaggacaaactctggaccctgggagcatcattcacagttcactccatctcgtatcctacaagaatccccgggactctggggtgtactgagttcagggcgagcacatttgaggccacccgtcttgctgctgtggaactcggaacaccagtgcctgttctgtacttaaaccttatggatgcttactctgcactcccgggaaccgtgacttattcctcgcgtgccaccatcgtggcctagcttcgggcagcttgtcctttctcaccatttggcaaatgaggttactgagatacttagactttccttagattatattccaagagaggggattcaaacctggtgcaaagtgtgaatccccccccccccatcaccattacagcaaaaagaatagaaaacccgaagttcgtgaattaattgcgcttggctttgtggcccggggtcctgtccagcccacagtggcacagacccatcagaggacttactgttccatgtcacaaaaaaatagtgtcaagtcttcagacccagacccagaccgggaaggctggacagtggcagaccagacaccaagctgctgttcattcccaacatttccctgcagtggcacttctgttggtgggaagggctcagaggaggattatggcttttaggttttgtgagatgccattctctggaaaaacccaggtgttagggacaagtaatttggagaggagctatgttgaccagcacctttgggagcagttggtgggtttcctgtaccatgactccctgcctgaggacacaaaaaggcctataaaacagttacctagaaggaaccaagaaggccccccaggtccctgcttctctaaccccaccgtccgtaaaagaagttttctctagaggtgagggaatttttcttttatacctaatttgcttctaaaagatggtcagttttctttacatctggggacttatttactggtgtcccttctgcatgacaaatgacaaagaaaaataagccaagagtcagactttaaaaggcaaccctctggtttgtagtctggaggcatctgccaacttattttctcttcattttgaggaaactgcaagcacctcttcacagcacaactggggacaaaaaaaaatgggtttggatttcggttctatacacaggctagcagctatcaattatatatgaggtttaaatagccacatcctgccagtgtcccattggggaaaattcttttatatcagatgcaaccatatcttggatcttgttagtcttgccctaagagaaggtaaataaagtgcagactgagaaatcatgcgacttgcattactgttgtgtttttattttatttcataaagaaaaattttcaaagatgaaagttggggtaaatccttaaggcctcttcctggaaaagaaatcttcattgtcctagattacgagaaactttgggatcatttacctaattcttctctctagcagtgtacctctgactctcagaaaaaaggaaataattggaacatgatctctagttagaggcagaatctagactcaaatccaggactccccaaatgacctgacacttacgtcactaagatgactaggacaactatttagacacaccatgataacccaagttttttcccagaacagtcaattttcaagtaccgactttgaacacatattttgttaatctcttaaagatgaagtattgcaggtctcagatcccttggatccaagccaggtggttgtgacccctgaacatcacagattactagtttagtcaaaattagctcgggaattcacttaaaaacaaaaacaaacaaacaaacaaacaaaaactttccttttcatcccactaccttttttttttttactcctataagacagcatctggtgaaaagacaaggccagccagaagcttaagttatactcaagcttctgcctcaaaggaactggagggactcactgcgggcaggggaggggatgcatttggcacagtcttcatagcctgtgtgcctgcatcctctccaagactgcgttcaccaccatggaccacattttctgtatataccactcacaacattcacatgagggcccaattttgcctgtttcttttctttctagaaactggtgaggcttgagtatcctagtcaatccctttatagtttagaatcagtccactcctccaaaacatcaggggaaactcaaagaattccagttggtgagtatttatgtcacaggctccccaacatattttaggggtgctcaacattttagttaggaatctaacaaggagacaccacccatgcatggtcatgattaaggaattcaatcacattgccccctcgtggctgtaatgcataagtgtttgaggaaaacctgaattgttgaaactctttatacaaacataggtagcattccattcataaagaagtcctgtccttctgttcaactatgttcatagcagcattatttgtaatagccagaacctggaagcaacccagatgccccttaactgaagaatggatagagaaaatgtggtacaatggagtactactcagcagaaaaaacaaaaacaaaaacaatcgaatcttgaaattcgtagacaaatggatggaactagaagaaaccattctgagcaaggtaacccagtcacaaaaagacaaacatgatatgtactcactcatatgtggattttagacatggagtaaagaatgaccagcctacaatccacactgccagagaagctagtaaacaaggaggaccctaagagagacatacatggtcccctggagaaggggaaagggacaagatctcctgagggggaggggagagggagctaggagaatgagaaggggagaagaggaggggtgaggaggacatgagggagcaggaaggttgagctgggggaagaatagaggagagcaagataagagataccataaaagagggaaccattataggtttaaagagaaatcaggcactagggaaatgtctggagatctacaaggatgacaccaactaacaatataagcaacagaggagaggctaccttaaatgccctcccctgataatgagattgatgactaattcatatgccatcctatagccttcatccagcagctggtggaagtagaagcagacacccacagctaaacactgaactgaactggaattcagttgcggtgaaggaggagtgatgagcaaaggtgtcaagaccaagctggtgaaacccacagaaacagctgacctgaacaagggagagctcttggtccccagattgatagctgggaaaccagcatgggactgatccagactccatgaatgagggtgtcagtgaggatgcctcagaaatctatggggcctcttgtagtagatcagtacttatccctagcataggaatggacttttggagcccattccacatagagggatactccctgagcctagacacggtgtgtgtgtgtgtgggaggcttaggccctatcccaaaggatatgacagactctgaagaccccctatggaaggctcaccctccctggggagcaaaaaggatatgggataggtagggtgttagttgggatggggcaggggagaaggggagagcgggggaactgggattgacatgtaaaacaatcttgtttctaatttaaataaaaaatggagaaaaagaagaagtcctgtcctgtcacttctgaaaaggcttcccagaaacaggcaatagccaggcaagacatttatagtccatgaaaagaaatggattctctctattctggtcacttcaactaataatacatgtttggaacaggtaaaaaatgataaaggcatgccttatccgttttattttgacttaaagcacatacatgtcaaaaatactttgaagggctgtgggcttctatcatggtgtggggtctactgatgggagtttacatactgccccattagatagttacaatagtttccaatttggagttgcataaactggagcctacaattaagagcatttggacctgaaaacatggatctgcaggtgactggagctcggggacctgatgccctcctctcacctcattgggcagcccccacctgatgggggatgtccttttgtatgctgtgaatatagtttctcttattggttgatgaataaagctgttttggccaatggacaggcaggatgtgaccaggcaggaagtataggcagggctaccagactaggagaattctgggaagaggaacacagagggtgagtcaagagaaagataccatgtagctactgggacgataggatgctgggaattctccggtaagccaagaccacttggagatacacaagttaatagaaatgggttaatgattaagagagagagagagctatccaataagaggcctgagccattggccaagcagtttataactaatataagcctctgtatgttcatttgggactaaacagcagcaggaccaggtgggacagaaacttctgtctacacccaccacatacacataaagtaatactaataatgctattaatactacttataaaatcatttaaaaattaagagcatttaaaaatcaatctgaaaggcaacatcaatcttgtttccttcaaaagataacaatatatctttaccctgtatttgtctgttgtctgtggtgatatattgtttatgattcattaaagccactggagttcaaaataacaaagcagcccatacaagttagccatagaagccaggcacacacctttgatcccaagactccagagaaaggcacatgatctctgagtccaagactaccctgggctaccagagagtgaatcagagctcatgcctttaatctcaggatttgagaggtataaaaggtagaggcattcagtctgagagttagtctctagccaggttgaggagagcatagcagtctgagtgaatctgaggagcagtgaaattgggaatagtttggggatcgcccctttggtctgagctgaggtagaggtaagagctaatggccagctgctttgcttctctgatcttcagcttgaagcttgaaccccaatatcagtctctgacttatttatttctcatgctacagttgtctggcctatagctgattctctgtggagactgactgttagggttttcttggggaagattaaaaatgacctggaactttaagaactggtaggcctctgtgagccctcccttctccaaagtgggtggtatgagaatttaaaaaattaaaggcagagagacacatgaaatcatatggtacgtccagcagattacaaaagtctgcactgctgattttagaagatgaaacagaagaagagagaaggttggaatcgagaacatgtggttccaatcaggcagcaacatgaatttgtgtgtttcctcatcatgcccatcagagtgtattagctgtgtggcaggtcctcagcaaaattgtggaacacttctgaggttcaaggatgagaatgtcctaaagcagccaaagtctggtgaggaaaatgtgtgtgtgtgtgtgtgtgtgtgtgtgtgtgtgtgtgtgtgtgtgtaaggaaatgtcttttttcttctcataatatgtgcatttggtgtgtatgcatgtttcatgtgtgcacacatgcacatgaaggctcaaggttgatatggagagtctcgattgctgttccacctaattctttaaattagagtttctcaaccagacttagatctcgccacttcagctagcctccattgccagcttgctctgggaattcattcttgcacaccaaaattggaattacaggtagaccactatgcctacccattatttccctgggtctcaggggaatttgaactctggtacacttaggatttaactgctgagccatcttcccagctactagggaagtgttttaagagctggtcaagttgaatctgatgccaacaggattgtaataattctagctacttgagagcttgaaacaggaaggtggagagtttaagaactacctgggctatagaagaaccaaatgaatggatatctggagggacagaggaagtgcaagagcaaaaacctaaaaactagggcaatggtgcagactttgaaaacattcatgtttgatctgagttttcaagggtaaaaggaggccagaataggggtgacacgctacctcctgactgacagctgaggcttccttgggctgtgcactatgttcatttcctgtcctgggtctcctttctgaagaaacccagcctgtcactaagagttcagtacagtccacagagaaaaaccatatgtggtacatcaacagcagacttggctatccaacagctgcctcacagcgaaagtcgtgtatataacccaggcagaaggtatgctcatctcccatttctcaggtggaatccagcccaaaggtatggtgtagtctttgtattgatttatagagatggctgaatgggtaaaggcgaggatgcaaagccctatgtccagagttcgattcccagagcccatatggtggaaggatagaaccaactatgccaagttgtccttttccctttacatatatacagtgttgagcatagccgcattgttctcatgtgaggtaaaccaaagacattagttcattaattgactgaatttctcaactttaaacggattctttgaaaagatgtttagcaaagtggcatggcacttaattcatggtacttagaaatttaaatgattgggaaaatattcaactaaacttaagttattaaattatatttacttagacaatgtattaaacggatatttttttaggaattgtattttaaagaaaggaggaaaagagagggggaagactaaaattgagcaaatatgtgaaaatgtggcttttgaagaaattaaagtgtgaaaaaagaagtttgccataaatgatggcgggatagagtgttttttgagacaggatctcacatagctcagactggcctcaaactcactgtgagccaaagctgaccttgaattcccaatcctccggcctacagtgttctcacagtgctaagtttgtgggatttcaccaacatgatgagcactctctcactttaatactcaagcaaagttcataatgctccacatctcgtaggtcttcaggctcatgaaagtattaataaaagtctatataagttctatacattttctgaaaaaatataattctatgtacatgcctatattatttaaatacttttaggtgctatggaagaataacttagaatcactcaaaatgttgtcaaattcatttcttggtctttatgtaatatttatattactgaatactccaaatacagctacagtcatagaggtacccttattctcttaaagactggatactcgctgctccttcccacccacccactgctcagggttctcatctagcaggcatccaggaggacaatggatctacatttctatgaagctcacaggtaacacaaatgaggctgaccaaggactgcactctgacgacctctgccctccccgtatgtagctcctccacaccctggttttatagtaaacccagaagtagaaagagaacagtatgtgtgtgggaggtaacattgaatactattctagtaatttacttctccaggttttttgttttgttttgtttttaaagacagggtttctctgtgtagccttggctgtcctggtactcactctgtagatcaggctgaccttaaactcacagagattgatcggccttcatctgctgggactaaaggtgtgggtcatgacatgaaagcagaatggctattagggaaggagaggaccaatgagggggatatgggtggggggatatgagcaaggtagacactggtgaggtttgttcttagggatacaatatactggtcattgtgattgcccaaagagcttgaaacaaacaaacaaataaccaaacggttctgctgccaagactttgctttctcccagacccacagctggctgggtggaggggcctgccatagaatatgtcacaccttgtggtgattcagcagtgcagccagctgggaacctccaaggttctccaactgcagtgtgtccagaaatcccctagagtgcttacaaaagctggcattcctgactttcaccctggcattcctcagcaaggtcgtttagctctaattatcatggagaactgtttcactaagctgggttctctttctccaaatgctttgtttagtctgcatcctcagagagcttttaaaacttataacaccatcccaaggagacacttctgctctctgtttaccattctgagaccagaatattcctgtttgaatggtgctgactatagggaaaagggaatagaagtacaaaaatccattaatgctgttaagacattatcacaatatgcttttagaatttttcccttttagaatctttaaaactaagttttattcagcatacaagataatgatttcattaagacatttcatacatttatcatgatatacctaaaaaaaatgtaaccaaggaagtaaaagacccctactatgagaagttaaaatggtgaaggaaaaaaactgaagccactagatgatggcaaggcttccatgctcatgaatagggagaattaatattgtgaaatgcctgtactgtctatgtatataccttgttcatatcctcccatgtccccttcttccctcaagtggtactgcttctgctttcaaaccacacacacacacacacacacacacacacacacacacacacacacacaattttaaaatatagattagcatacaagagaaaaaatgtgatgctagtttatctagttctgacttgttttgtttaaaattatcatctccagttccattcactttccttcaagtgacataaatcctttcttatatctgaataaaattccattgtctagacacaccaattttctttatccagtcaactgttgtgatgggcatcttgactggttctgtatcttggttattgtgaataatgtagcaataagcaaatatctctatagcatgcttgcatatagttcttcaggtaaggacttagtcatggtatatgcagataatgtagtaggttcacttttagtttttggaggacccttctcactggcttcacagtgctggaccagtttactttcccatcagcagtcaatgagggctcctctcctcacacctgcaccagcttttgttgtcattggcttacttgatgatgctcattctgacttgggtgagatggggtttgcattttcccagtgtctaaagatggtgaaccccccacttccctgcccaagtatttactggacatctgtatttcttctgtaagaagaatgggttcttttatttaactcttttagttctttatagattctggatattaattctcagttagatgttacattgacaatgacttctttctattctctaggttgtgtcttctttgctgttcagaaatgacttgtcagtttttggagttatttcctgagtcctttgcagaaagtccatgcccatgcctgcatcttaaagtgttcttcctatttccctctggaaacttcagggctcaggtgttaaaggcgagtggggtggtgcagtggtttgcttccatgagtggttgcctggccatggctcttctctttgagagatgatacagaggtaggccagatgctttaaacagtaatgtactggacataccaaaagaatcctaagtgtggaagcagaaaacctacattcatatcatcttcccttttctgttccataacagtgagcagggagcacagccccaggaggacccaggactagttaaaagtcagcttaaggcatagaatatatgtgacttgaatccccctcaaaatttgcagaccctctctataatacagatgttttcaagatgtcaagcaagttgctttaagctagttttctatgaactctcagctctctcttctttgctgcctacaagcagcgaatacattgccttttgcacaggtaacacagttttgcttgtgaaagggttctcctcctctcttgtacaccaaagaaataagggcactccaacattaatgatgaaaaattggcaccaaattaaatctgcacaaataaaccttactgaagtgacctttttaaaaatcagtttccccctcaatttaatacaatatgaaagttctcccacctaactgctactgggaaagttcccttattttctaagcagatcttcttacattaatgtgaaataagcctttgaacttattattctgtctctagttagtttgactccaagacccaccttctaaacctaaaagagtagagggaaaggttttgttgtgttgtgttttccttcctagtactaagtactagaaagtcctaccccacatctgcaacacccaatcgtcaaaagttctccccactcatcattgcctgtatccactcaaacgtggaatcagtagggtaaattggaatgtgtgcagtcatttacggattccgtcagatgattattgtaaatgcaacatagccagttgatacgttttctttaatttctgacaaattcttgaatccatagccaactgagatatgtaattaaagcatgatttaatagttgggaacgtgccctgatctactcctgccccccaataatttaccatcaggaagtcagtcgaactatttcccaacaacttacacaaattgtactcactaaagtgaaacttcttgcagcttctactgtgttagagcgtcacacattcatcaaagtcactgacaacttctttcccaagtgttagctgtgtggactagaggtacagatccccgttgtaaagtgctggctcagcatgtgcaaatcctggcttctatgcccctcccccagccctccccccaacaacaataggcaacaattgcttttgaatagtggaagaatttcttcagttttctgtgctatgtttttggttttttgggtttttaaatttatttgttttttttttgtttttgtttgtttttctttttttttttttctttttggtttttcatggcagagtttctctgtgtaacaacttggaactagttctgtagatcaggccggcctagaactcacagagatctgcctgcctctgcctccctagtgctgggattaaacatgtgtgtcactacccagcttctgtgctatttttaatataaatttacaaacatgatccatttttaaattaatattcattttccataaagttatctcttttcttttttttttgtaaaaggtttattattaagatgatgatttttttagctatttgagacaggttctctctgtgaccttgaacgaatagagatgtacctgcctctgcctcctgagtgctgaggttaaaagtgtgcaccactaaagctagcctgtatatgctaaattcttttatgcgtgtgtctgtagtgcccaagaaggccagtactcttagatctcctggaactggagttacaggtggtggtgaggcaccctgtgtggggtgctagaaatggatgtggggtcctctgtaaggacagtacatgtagttaactgctgagacatctctctagcccttctttgatgtttttccctgtcttattttaatttgtatgcatatgggggatacacgtgcatctggaggtcagagggcaattggcagaagttgattctctcctaccatccgagttcctgggattgaatttagattgttagttttggcctttatccacggagacatctcactggccaaccaaacctttctagaaacagcaagaactctagccatgtgttaagttgttgacttaacaagcacagaatgttcaagaatgatacgttataggtcatagtcagctgtcttaaatttttgagaggaggcaattgctgccaggaacttttaaccccgagaactcttttctgggattggtgccagggatcagcaagggcacaaagttgtgaatatgggggacagcccctggggtaactcatattgtttctatttcctgttgtgtcaccttgggaatgggctggattgatgactggctttctaaagatggtagtatggctagactaggtcacaaaaggcaggcttcctaaccctgtcttcactcttccagctgcccctccacctctgtcagcacctctttctctggctgctgtgttctgagctgccctggagtgagattcacctgggaagaacactgatgtgtgtatttaggaccagtgatgcctgaggccggtcaatagccacacaactgatactcagatgtcttgtcagaagcagaaacctgtttaagacatatttaaactgggaacagaggttaaaacttatttactgaagcccacagtgcagaaaaagcagatatctggatatctgttcaaacagcaagaacatatttataactttgagtcctagcaaaaactacagatttgggctataagcatgtacatttttcttctgtccagagagccaggtatggattggacagaggtgcctttggcctgatgaaaagccctttaagtttgtacttagatgacaaccaaaataaacttaaaaattttgagcttgtgcctgaacaaataggtagtcattattttatcagctaacatactgactagtctatagtggatctgactgtctgatgctgtcaagctgacaaccagtaatatttcagagatctgagaagggtatattttatccgaatctactaaaaagtgacagaagccagttagaagcaagtccatatacagttagccaaacccaagtttctccattatcgttggaggcaggtgtctcaaagaacagcaatctttgccaggcctatactgtgagaggttttattttctctctgtggaagagggacatggaaaagactgaccttgttttgtctaggcaaaggggtacaatcaattttccagtgtccagcagctttgtccacagtctcggccaggttctggcaggcggcaggtttcatatctgagcatctcgctcactggtccaggtgcgggaactgaggtgcctcgtaatcttccttggagactttgggtcactgtcaggatctggcagtctgtctgacattataaactttaaagattaaatgccatattctgaagatctctgaagcattagaggtctgtttgtctgttttaattacttgccttaagcacacattaagcatacaggtggctaggtaaggtcttatttctgtaaataattagcacctgctctagagtctcctgggtttccttcctccaacgttcttctctttctatctgtgtttccctcttattaaaaatatgttctgctttctttaacaaatcttggagtgtatatccctgtaaattttctagcctttgaagcttgtttcttatgtccggggctgattgccaaataaaggacatagaaacgttggtcgcctgacttggatcttccagattatagggagtatacattctgtacacttcttttaatctctctagaaaagcggcaggtgattcctccgcaccctgtatcatctgcttcacctgggccaaattagtgggtcggcgtccagggcaggcacatctaagtgccaggattccttaaacagtagcttaacttctttcttaggcagggtttttttgtgacttataacaaccttttctctgaccttcgacaactttcctctgaccttctataactttcctctgaccttcgacaacttgctttaaccctctgtaacttttaccgcttgctttaactctctataaccttctgtaacaatcttctctgctatgacttgctttaatcctctataaccttttagttcatttctctgactttcttagacattcttagacaaatttccctttttccttttttttcttctttattatttaagtctcctacattttttttttatttcttagttaacatcaaaattttatcaaagtcctttttacagttcttaataactttaaggccgtttagatgtcctggcgggggctcctcagtcaattctcccagggggagtacctcaggtgtcttctcttttacctgaaatatagtttgggggttaaaggtaccatcccgtggccagcccacgtcaaaggctggccattctgaggaacaaagagtaatccatttgcgtttatgcacatcaattacaaaacaaagaccaaacaacacagaacaggttttcgcatcgcagtttcgacagagagtcaaaaggaagaattgagaggggggtcgaagaagggggccctccttcttcgtccccagtaaagattgcaaatccctcaagccgagggccttctccaaagagactgggaagatgttcagtcatagatctaagttcaaagtacaaatccctcacgccgagggctacaatcgctaccaggacgtctcctggagcctcggtcgggagtccgaactcgtcagttcctcctcggagctgccacatacaaatgtacgcagctgtgtactacaaacgcaagcgcaatacataaaacggattcagacagacagacaagacgagatgagacaagacaagacaagacagcggatccgaacaacgcttacctcccaaacgtgggtcggtggtccctgggcgggggtctctatcccggacgagcccccaaatgaaagacccccaaagaggtactttcgtagaaggagacctgtacccaggaaccagcgagaccacgaacttggatgcaaaagcaagaggctttattagagactcgggtacccggggcgacttagcttctgtgtggctaagcgcgccgagccaagggaaaggggtccttatatagggaaaaaggcgcaagctagaagcagggattctattggataattctaatgaggcattgtacagagctattcccattggtcaatgtaaatgaggcgctatacagggttattcaaatgaggcgaagtatagagttattcaaatgaggtgaaacacagagtctttcaaatgaggcgaaatacagaatcatttctattggatggttcaaatgagacacagagccattccagaccagcatattctcaaggtctggtgtctggtacaacagactcaattccctccgcgtccggatagctgaccttgggggtggagaccttgggatggagtgtttctcatcaggtgggggtgtgggggtggggccccgggccagcctaactggtgctctcgccctcgggccggcccacctggtgctcgttgctcggccccagccccgaggcgcggtgccaggcggggcgggccgggggcgcgagccctgccggggtgaaggcttgggaggccccggcagctccgcggcccccgtgtccttggccttggaggcggctccccgctcgcagctcctggacaagcagcaccgctgctctcccagctcaagttccccttccaggcgccgcccgcgctgcattctccagcccctggccgaaccctggccctgccctgctcagtccctgctgcgctgccctcggttaactgctccttccgcctgctccagagagaacacccagcaccggcacaggcggggaagacagaggggcaggggacatgcagaagcgttccgagccggtctttcattcccactgcatcctggggttttctgtggcttgagctctcacaagtcttgtgcatgctattctacccactgtgagttcatatgagcaactgcctcattgtgtcttgaaaacatcatttccgtgtagtcatatactatctcttacggtcccccatgcctttatctgtgaaaatcactgagcctggcacaggagaatgtgatgtggccatcccatttggtgaggagcagcctgcagactcttattctctgcacattgaccagttaattgccacctgctacaagcagaggcttctctgatgaaggttgagggataccctaacttacaggtatggctataataagtcattaggagtcactttaatactatatccatttaacagaataataataatgggctctcccctggtattgcctagccggaggctcttggtcccaagaacagtgctaggtgtggcttctgtcatgtacaacaggtcttaagtcctatcaggaaaaccatgacacttgggccacaaacttccaacataatccactgttatagcccatgtttactaagaataaactttatagactgaaggagagtggggccacctatagcagtcattctatcctgatgggtcattgtatcataaaatgctgaaaaagcaccagaggaaactttgctgacacaaatgctccagatggtgcaacctcatgacagtgtgctgttaggatttgctcttttaggcctaatgcagagctggcaaatccagacagtgaagctaatggctgaacactgggcactattgaaagtgcttatagtagtggcactattaggagatgtggagtatgtgtggccttgttggaggaagtgtgtcactgtggggatgggctttgaggtctcttttgctcaagctatgctcagtgcaaaacacagttgcttctgctgcctgcagatcaagatgtagaattcttagctcgctctccagaaccatgtctgcttgcatgccatctgccatgatgataatggactaaacctctgaaactgtaagccagccccaatgaaatgttttcctacttacgagtggccatggtcatggtgtctcttcacagcaatggaaaccttaactaaggtaatgctttatacttattaggggcttaagcactcggcaggtggtgttgctgttccacttgaggtacaagaaggttaaggggctaagtaaaggacacaccaagattcaaacacagagtcaggctccccagtcaacactcaccactgcttggcaagctgcctgccctgcccctgtgcatggaatatgtttgaaatattttaggtggaataaaatgatcattaactggaaatatttatggaaaaatcattctgtataagtgaaggaggaacgtaaatgtttgtagaaaatataaccagttttttaagtctttgatgatttaaaagaaattgttgtatgatgttcgttttttatatatccctaacaacaggagtttactcctgaactggttcctgatagacagcctgctggaggagtataacatctatgtttgatcatttaaaggactgccagactgtttcttaaggtggctgaaccagaatccaatcagccattataggagggttccaatttctccatgatcctattcatcactgtctgccttaagaaaaaaaaaataagtacctccaatgaatatgaagtggtatcttgcttttttcccttgacctgctccccacccccaattattgatgttaaatatctttttgtgtatttttttggccattggcattgcttttttggagagcattctatcactttctttcttaactgattcaatttctcctcctgagagaaaagccatcaaaactcaaactgccactggtttcacttacctcagtgcagttcataatctccaggaaatcatcaactgggtttgtaaagcatgtgatctttgcattattaacatcttacttttcagagttcatgacttcaataaagactccaagaactcaaagttcattgcacatggactgatctcagatctgagagggttttggtatccaagatactattgaacctttggggctttattccaaggctgtaactcgggatgaggattagtcacaaaatatcagatgaccaatctagaattaacaaaaatcaaaatagtggcgctcagggcctttcaaaacccccaaaggttaacccaccaacatgggttgccttgatctgtcccggtcttctctgacagttctgggaaataccagaaccctggctaaagaagtctaccagtcaccccagccctatctcatgctcccaggtatgaggtgacagagctgtgaataaggaagccgtgaagggcattggctgatgaggctgtgccaacatcgtggctttgaactctactctggctgtttattttcagtttatgactcttggcattcactttacctctgcgaacccaggcaagttaaagtgaggtccaaaagtgaggttcaggtctaatgtagatcatggtaaacgtcagtatttaagggccagattcatatactgtcaatagtaaccttgaaaattcttcaagttcaaaaacaagtacatcctaagtatatagtttagtgcagaaaatgctaaatgcagtttcctcagatgccccaatgctgtgttcattctcctcagtgcaccaattccttgccctctttgaacacaggcctctggcagaaacaaagggctcattttggggagtcaaacctttgcaatcacttttcccatcttactagaggtttcggctcccatatgaggctgatctcaagtctgactgtatctactcctcatctcaggcttattgggtgacttgtaaggcattcctcacaacacttcaattttctctttttttctaagtactcatgttggattctgacaagttaagtatgtgtgtgctggttcttagtaagccctctcataaaaggcctccagcatgtgcctaagatgtcaaagcaccccaaactaagctgcttggttgactgaggtggtaacctccaagatttctcttctaagagaggagcatggtgccccaaggagtacttggtgcccaactgtgctggacagtcactgttctggaagccttccaaggtctactccacctagcctatcacttagtagacatagtactatggtcacaccagaggtcagctggtgcctgggagaagagttcgtttaaaccaatctagacccagagcttcagtatctactccagcagtagcaatggtgagaggaaaggatataatacagtcctccaagggcagagtgtgaggacacaggtaccatcagacaggaaactgagggcatctggaacttggctgggaatacaaagtggcaccttgccattattgtggcttattcattaggaagctcctcgttgaagtgttttaacaacagggaaacacattgcattggctgaagtgagttggctcagtgggtaaaagtgtttgcctcacaagcctgggaacttaagttctaaccctggagcgcacataaagattaaaggagccaaccaatctaacaaagttgtctgctgacctctgaacacgtgccatggtttgcttgcacacacactcatgcatatgcacactcacacacacacactaaaaagacacatcagttaactgttcatcagtagagaagtgggtaagacaattatggcgtaactggtatatcttcataatagaatatctgttctagtagggacaggctctgggatctattgctaagtggaaaaaaaagcaagaatatgaaagataggaaaggggaaggaagctgtagtgatgagtacatatccttgtttatatttgctttgcagttctctagaaagatacacaaactatgactagcagctgttgctttcataaaggaaaacatactcctttaagctgtttaaatactttgtgtgcttgtatcaagtttgtttaaaaaacataatgttaaaatcaaactattaggaaacttaaaaaagaaagcttcagctcttgtatttttcctttatcttaccagcagagtggtatataatagaattcctgccactctggccttttctggcaaaagggttttacaatcaaataatcaaaggttgttggatcacttccataaactaaacacacaagtgtacagtcttctttcaaagatcgagcataactcacctaatggcagcacgtggaccacagcagagaggccccatggctgcactcatttgtgttaatccaaggcacatcctcacaggactcagaaaatgaatatgtatttccccttatataggagaaggaaaaacgattccctcaaactccattcaaatttctatgagtatataggacaaggtgactcagcctgtaacagtagcactagagaggctgaggtagggggactatgagtttgagtccagcctgaactagttggtgagatttagagagagagagagagagagagagagagagagagagagagagagagagagagagagaggggggaaggaaacatgagtttctttcttataactatttgaaatttaagtttttgcttggagaaaatgtggcagtttgctttggtccttcattcatgccatgcatttttatcatggctgctccgctatacaatccatgtcctgtagttggaattttctttgggccaccaaccagctcccaaataaagacatggagacttattatgaatgcttggccttagcttaggcttggcctactagctcttttaacttaatttaacctctttttattcatctgtgttttgtctcagggattttttttacctttcattctgtatgtcttactttcctgcttccattgtgtctgtctgtctggcccttggtttcttcctggtgtctctttttctttatttcccaagcctaaatcctttccctacttactctccctacccggaagtcccacctagacctcctcccttgatattggctgttcagatttttattagaccaatcaggtgccttaggcagacaaggtaaaacagcaacacatctttacagaattaaacaaacgcaacacatctttacatagttaaacaaatattctgcaacaatgtcttcctttcctagaggcaacctgcctctgattttcctttgggaaagcacccttagtgttagttcagatgttttcttcacagaatgcctcacaactgagatcctccaccaaaaccattggcaacctcaggaacacctgacgtgttctgagttctggtcctaatactataaataggagccaagaaaagaaatcctagaactttcgtggaactattgacaaggggatgatcacctttagtggaggctgaaaccaggaagatgtacccttgaggctccagtcactagacaaggcagccaactgaaatgcaagatatgtggagggagacagactttgggtggcatcaaatgaactgtgattcctgctcctcccaaacggaatctccctctgaatcttacagttcgagagttcatgttaatttcattttttttcctgcctattaagtttagcaacattctttttcaagattcatttattcaatgctcatttctcacctatatttgtcactcaaaactagaatgttcccaacaaatactgatgatgtaaatgaatcgtgcatgagaaatgctccttttccttcaggagtggcaggcatggggttgaaaaccatttatcttgtgataggtaattggacacattccatacccagcgctttgaggtcacccaaagctaaggataatgtggtatgatgccttagggctgcaagagagcctggagtttgtctatgccaaccatctcattcaaactgggactctgaagccagagtcactctaaagcaccaggaatggttctgaactgtaatttacgactcttgtataaaggtaattttaacaaaacaataatagaagaagggcctaaggacaaaaaacaaagtcatccataatacccaacatctaaaagaacccttaggctcctttttaatgaattatcttttaattttagtgaatccatgctgtttatgatttgttccttaactaaacgcacgcagtagtatggcatttccccacactatcagatagtcttctatgtagtttcattgcctcaataacttatttgtaacttatttgtccctctcttttcagatagctaggctttttccaattgtttagctttcaatgcagtgcagagatggaatttttaacagctaaatctttatagccgtcttgtttctcgagacaagtttcctggccacagagctgttagatcaaagagtacaaaacattttaagactcaagcttacattgcattttttttaggcagtactggtaaatacttcagagtgcaacacacaaccttcattagcaggggcaaaaatctcaagtcagcttcctacaagaagcaacaggcattatgatggtagaggttatctcattaatgcagccaggaagcgtacatcctgagaggagggcgtggctatggtctccttaagcctaagcagtgtgttagagaagaaaagctaaaagcaccagagttacaggccaccaagctctctttaaatctttaaatccagttatcacatggtcttccccaccatcaccgctgccatgcttagcctgggcactcatgtctttggtgcctctcacatgtctttccaactcaaaccatggaagccttcaagtctcttatgacatgactaataagccacattctgaaatccacctttcttgtcacttgtcccaatgaatctattcccacagacagggtctctctccgccgagggtgatctatactgaccacacgagtctaaaaccactttctctcccatctctaccccttgaatcatcccacctcaaaagccaccaattcttccaatctgccaggcctgcccagcagatctttccttatgaggcacttgcacccctgtgcctggtaggccccctgacggtgcggatacatctcacggaattttttttttatcagtcagttccgtgtgtcctgtttacaagtcactacataagtgtctgccaagtagcattttgcagactttaaattacatgaagtggcacaaaggtgactactctttttttttttttttttttttggtttttcgagacagggtttctctgtgtagctttggagcctatcctggcactcgctctggagaccaggctggcctcgaactcacagagatccgtctgcctctgcctcccgattgctgggattaaaggcgtgtgccaccaacacccagctaaaggtgactactcttgtgagatcatgtttgatggcgttcccttttctccttgtggaaccatattggccatccttctcttggtcccagctttcccaagcagaccataggcagctcattcttggtggacgttgccagtttgccctgaatttttggcttgaagtgcaatcatctttcaggatttatgtggggcagaaagtctacttttttcttgggggagattctggaaactgctttgaagatcggacgttattgtttatttaaaaggaaacaaagaagaacacactaggtcaatgttccctcaccgagcaggagggttagctagcactcacccgtaactaagaagctatggtcaggtggattccagtggagggagaactagctttagttacagatgtagcccttgttagattgaacatccagtgcgtggtcccacaactgggattatatgggcagctatgggtagcatagattggactcgatagattgattacttttttaaaaaggaggagagtggaggaggaagaggaggaggaggataagaggaagaagaaagaagaaaatgatgagaaattgagagacaaggaggcaggcataattcctgggaggaattaggagcaagtgtcagggtggctatgataaaagtacattggtgcatgcttgtaatttaattccagcagtcacgaggtacagccaggtggatctctgtgagtttgaggtcaggcagggttacacagtgtgaccatctggcctgatccggatgttccaaaaaaatggctttaaagttattaaaaactataaggaggactttgataagagtttttatgttgactgagaaatgagagaaaatgtaggagactaaagtaataaagagggaaagggaaagagaaatttgtctaagaatgtctaagtgtaagacccccagaagctcaggcctccaggatctcagcccaggacctcagtcaccccaatcaccagatggattcgaaagcttgatgcaaacagcaagaggctttattatagttgtttaacgagctaaccccatgttagctcgggcctttcatccacccgccatggcggatggctagaaaagacagctcgaagcatctgcatagagatcttgtagggcagcataaggggagtgtctaggggtacgcatagtctcaggattggtgtgcctccaggcttggagggtttcccctgtgttgattggtcaactggttgttatggcccataggccctcccagggtggttgctatgctctgtgcgtcattgctgtgcacttgtctgtaaagcacacccagagctgtaaagcatagcaccactagctaacttctgattggttccttgccacgaggcaggcatctgacctcttagtgacccaggcaaggtcatggcaagcacctgttactgtcatggctgccgaaatggggagctggtcccttcataaggaaatcagaggaatgaactgaaggtacatagaaagttatagagggtcaaagaaagtcacagaaggtcagaggaaagttgtcagaggtcagagaaaaggttgttaaaagtcagagaaaaatgtaaactgtttgctatggtttctcatgcttacaaatagtaaaaattggtaatataagttgaaattttaaacatattaagctaattctgtttaaaaagttctgtttatttctcaagtaaattatgtatgcttgttttgaaatgttctgtttcctggcataacctaagttcggttacaagcatacagctaaaacaatggtgcaggtcaccgccattttgcagccagccacatggcaagctggtcacatggctgactggtagccattttgcagaaattgaaaaaaagatacttaaaccgccatcttgactaaaggtgaccacatggaaactaggaggtaccatcttaaacaagtttttcaattaagatttaaaatgttaatgcttctatttattacagaaagacattaagggattttaaatttctttttaaaaccagttttttgaatgtttatgttcttttaaagtgtttctattaatgtttgtacttaaagagcttcaatttagaatcattttttaagcaaagcctgacaatgttaaattcttgttttataaaagctgctaatctattataagatgttacagtttatgttttcagaagttaagtttagggtgttggtggcacacgcctttaatctcagcactcgggaggcagaggtaggcagatctttgtgagttcaaggccagcctggtccacaaagcgagttccaggacaggctccaaagccacagagaaaccctgtctcgaaaagaagttaagtttaagcaagcagctaaaatgtgtacatgtccgcagttttaaattcaactgtgctaagtttcaaatattttactgttaaaaccagttacagtcagactgaaaattgattgcagaaataaggattttcctagccacctatgtgcttaaggcaagtaactaaaacagacagacagacctctaatgcttcggagacctgcagaatacggcatttaaaatgttattttaagagttcataatatcagacagactgccagatcctgacagtaacccaaagtctccaaagaagattatgaggcaccccagttcctgcacctggatgatgacgatgctgaccagtgagctcagatgtgatacctgctgcctgccaggacctggccaagactggacaaagctgctggacactggaaaatttattgcaccccctttccttagacaaaacaaggacagtcttttccatgtccatcttccacagagaggaaaaaaaatctctcaccttataggcctggcgaagattgctgttctttgatacttctgcctccaatgctaatggagagacttgggtatgactgactgtatatggactggcttctaactggcttctgtcactttttttaatagatttggaaactgtataaaatttacccttcttagatctctgaaagtattaatggttgtcagcttgacagcatcaggcagtcagatctggtgataaagtaatgactacctactgttcaggcacaagttaaaggattttaggtttattttggttgtcatctaaatataaacttaaaggacttttcatcgggcaaaaggcacctctgcccaatccatacctggctctctggacagaagacaaatgtacatgcttctagcccaaatctgtagtttttgctaagactcaaaattataaatatgttcctgctgtttgaacagatccagatatctgctttttctgcactgtgggcttcagtaaataagttttaacttctgttcccagttttaacatgtcttaaacagatttctgcttctggcagacacatctgagtatatcagttgctgactacaggctgttcctaagtagactgcgagccctggttgtgctgtggatgtgaaccagtccagctgatgtggacaccccctgtctctgaaacagtgtctgccaaccagaagctcctgatggaatccccattgcctaaattcccttttgtgcttttgaccagcatttcagccttcttgggtccctatcttcgtcccaaagtcagcaggagttagaatgggaatgaatacgtcgcccattttccctggttgaaatgctaaatcaaaataaactcccttacataggggatgccaataactctcactccctgatggggacgccagagagacagcaattccatgattggaatctccaaaaaggaaaatgggggaatgaagggactagcttcccatttcagcatccatgacagtaacatgtgcttgccatgaccttgtcctagtcactaggaggtcagatgcctgcctcgtggcaaggaagcaatcagaagttagctggtggcgctatgctttactgctctggggtgctttacggacaagtgcacagcaatgacgcaaagaacatagcaaccaccctgagagggcctatgggccataacaaccagttgaccaatcaacacagggcaggccctccaagcctggaggcacaccaatcgtgagcctgtgcatacccctagacactccccttacgctgtcctataagatctctatgcagtggcttctttctgtctttcctagccgcccgacatggtggatggatgaaaggcccgagataacatggggttagctggttaaacaattacaataaagcctcgtgctgtttgcataaaaaaaaaaaggaggaggagagagggggaggagaagaggaagaagaaagaagaaaatgatgagaaattgagagacaaggaggtaggcacaaatctgggaggaattaggagcaagtgtcagggtggctattataaaagtacattggcacgtgcttgtaatttaattccagcagtcacgaggcacaaccaggtgcatctctgtgagtttgaggtcaggcagggttacacagtgtgaccctgactcacaacaacaacaacaacaaaactttgctaagcatgaacctgaacctgagccagcatcacccacagtttctgcttcaggctcaaatccgtcctccccccaggctcccctaaagcacaccgtgtgtcaaatacaatcctccccttaacagtgttccatgaaaggggtctctggaatacaagtgacacaggcagttttgaaagagcttcacaacagcttgtcctggccctgggacccacacagcaaagccttgtcctcctgctgaattgctctttgctttgactcaggcagcttgagaacgctgtccaaggttatttgaacatgctgtgggtagttggtatgagcgaggtggacaccaggtacccgccaacaaaaaaagtctccagtacatttcctagactgtctcagaatgcatgctgtgcctaaatgaggatatagtcagaaatgagcttggcaaagtgttgcgctttcccgctcgtccacaaagagcagcgcgtcttcatccatgagagacccgagtgctttccacaggtcccgtgcgttctgacaccacttgtttagctctgagatggactgcagagaggcacgtgagtcatttgccacctcttttctgggatgctcctggtgcagagggcaagtgggttggtgtgtaaaccgcaggaggccttgtgtaatgtgcattacccaaaccagagaacagacacagagaagagctggggcggtctcaagggccaccaaacaatagacttaacagatgtcacaaagcacgtggcatgtgagtgagagaggatcaacacggctttgctaatggacagggcaaaggaaaaaaaaaaaaaaaaaccacgcggatggagtggtgtctacagaggcacagctgtgtgaagaactttgctccctctgtagggagggagccttgaggaactactgtggagacctccagggaaaagtgagggaaaggccacaggggtgggggtgggggtgggggtgagggtgggggcggagctactgaaccactccctcttcaccatctgggacacaactttcccaaactgggagtacctaagtggttagggttgtattgtgcaaatgcctcttgggaaagttcctcttgatgtttggcaaccctgagttgaccctccagaccagctgccagctgagcctcgctcttggggttgctaacctctgtggtcaaaatccaagcgttccctttcagttgacttcaggtggtagacattggccagaaaccagaaaatcagagagggaccagggaaggtccttggtagctgtttaattgagcaaggagagagaggagagagaagaggaccggggagagaagagggggactgaagggaatgaaggggaaacaagagaagagaggtgaggaaaaagaagagggtgggaggaagtgaggaggggagggaaggtgaaaggttcaggcattatgctggcctgccctttaacctggcagaacgggcagtaccctggtcagcccagggttccatgggaactaaatctgcaggcaggtgcagaggatccctttaatccctgccctgcgggtttatgctctctgctctctctacttttctctctactctttctcctcttctctttctgcttctgcttctcttctctctctctctatggcgaccagccatggtggtcagccatttaccctgtttctcttctcctttagtctccctactcagctgggctactaataaactggttaacgtgtctcatcttgagccccttcttcttcttcatctttaatttaaacaaaattttaacagaaggggaggggaggagaggagaggagaatatgggaggaaatgggaggctagagaaaggagaagtggggagagatttttttgtttgttaagcagttacctcttgaaaatgtggatcctggaagtctgctatgcagggcaggctactaaagatccagaaaatagccaacttgcaggaatttcctcctccgagacttcctgattatccaatcacctacactagagtcgtttgctttactctcacaggtactgatgtaagtatcatcacagggctcaaaggatggctcagctgttaagagcatttactcctggttcagaggacccaaggtcaattcccaacacccaaatggtgattcacaaccatctatatgtaactccagtcctagggaacttctgacctctgagtgcaccaggtgtgcatgtggtacacataccttcacgagggcaaaacactcaggcataacataaatttaaaaattacattcacctggccaggcgttggtggcacacccctttaatcccagcactggggaggcagaggcaggcagatctctgtgagttcgaggccagcctggtctccagagtgccaggataggctccaaagctacacagagaaaccctgtctcaaaaaaccaaaaaaaaaaaaaaaatacattcacgggctggagagatggctcagggttaagagcactgcttgttcttccaaaggtactgagttcaattcccatcaaccacatggtggctcataaccatctgtaatgagatctggtaccctcctctggcctgcaggcaacatgcagacagaacactgtacacataataaataaataataaaaaataaaaaattacatttacatctgtaagtaccttaattagtaacatcaagttgaaaatctgagagaaatctggctcctatgcctagccaatctgacacacagtgctaaccactgggcgtgtttgtcacatctgactcccttccatcctgctgggctgcaagttggtactggccacacgatgggtgggccctgcccctgccctgctccagggttcatcttcagccctctgctgttgctaactgctgtgtccatcttttgtttctcacagccctgcccacatcttagtgtgtttgtctgcctcaccccgattatcagacttcagtatcttagttctttcctcccagtggtctgtattacctcagagttggtcaggtgaagaaaaaaagagactgtgatgtcagtcctttggtgttcgtatggctcatcacattcacgacctgagtgctaatatatagagaagataatcaaaagcattaaatcaataaatagacccattttctcccacccataagaaaattgacttaaaaagttcaaccagataggtcagtgggtaaaggcacttgctgcaaggctgataacctgagtttgatcccccaaactcatgtggtggaaagagagactccctctgccctccacaggcacactgtgacacacatacggcatacacaaatacatgcaacagaaaaatttaaagttcacagaaaactaaattattaatccttggccagcgattctcaaaggaaatatgtttcacagagatggaagtttctaaaagtaaaaataataaatgcaacaatttgatgagttcggtgagaataaattaattttctcgattgttgcatgagcatgaggatttgagtttgaatccccagcacccatgtaaaaggccgggcatggctgtgcacacttgtaatcatagcagcagacatgtggagacaagaaaatccctgcagctcactggccagccagtcttgcagaattgataagctccagaatgaatagaccctggctcaaaatataaagtggaaatcaataaagaactcacctaacatcgacctctggactccacataaaatgtgtacacaaatacacacacacacacacacacacacacacacacacacacacacacacacacacgtacacatgctcttttaagatatattttatttttatgttaacgaatgtgaattttaccactaaattttgtgaatttttgcactaaactttgtacaaatgcatgcatgcatgtatatgtgtatatgcaacatatctgttcctggtgcctgcagaggcaagaagagggctttggagcccctgggactacagttacagacagttgtgaactgccatatgggtgctgggaacatgacctgggtcctctgtaagaaaagcaagtgcttttaaaccactgagccatctttccagcaccaagtaaatttcttaatttctgaaaagcaaaagaatgtagatgaatgtgcattttccagaggacaagctcaaaggaaactgagaagcttcagatgaatcctttaaggataaatcttggcagtcaaatacccttataaaacaatatcccgactcagttactgccttggcttcccttgttgatggagtgtaaccagtaacccaaatactgcagttcccacccaaagggcaaccttcatattggcttaagagccctctataatggccttaacttgattatgcttgtcacgagccttttctaaataagatcatattcacaggcacaaagggactttaacatagactgtgtcctgggcacacccctcaatccagtgtattgattgttaagttcttagtgacactcatgcatttaactagtgaaatccatgtgacactaagtaaggcaggcatgcttttgtgctcatttgataaaggaatggaggtaaagagaagtaattggcccatgtagaagtcagttcaacttcaacagcagtctagaagaatgaaatgttgattggaattggccgattacaatgcctttcccaaatgcaaatccaactactttgagatttcaccttacacctatcagaatggctaagatcaacaaaacaagtgacagctcatgctggtgaggacatggagtaaggagaacattcatccattgctgatgggactgaaaacttacacagtcacactggaaatcagtgtcatggttcctcaggaagatggaaatcaatctacctcaagatctatctataccattcttgggcacatacccaaaggatgtttcaacccacctactcattgctgccctattcataacagccagaaattggagatgacctagatgcccctcaatgggtgaatggattaaaaaaaaagtggcacatttacacaatggagtaatactcagccattgaaaacatgaaatcacgaattcaatagtaaatagatgaactagaaaaaagtcatcctgagtggggtatcccagacccaggaagacaaatatggtatgcattcatttataagtggatactagtggttaagtcaatgataaccaatctagaatccatagaaccacagaggataggtagacagtaagggaccaaaggggatggacagatagccctagaaaaggaaaatagaatagttacgaatagatggtaggtaggtgggggtgtcactggaacaggaggatcgggtggagaggtggagggaaggaggggacaagggagagaatatggatacagacagctaaagttaagggccatttgagcggtcatatgaaatctaatacaggagaagcttcataaaatatatacatatatgaaggtggtctaaatgaaattgccagatagtggggagacagattcccaactgaacatcttttgtcaccaaatgaagcatccagtacctggactgggttacgtctaatggagttgatggccaaagggtcccaaaggaaccccaaacaacccagtctgttgctctccattaggttgctctccacaaactgatggcaaggctccattgctgtggacaacacccacacaactcattgaacgtggcgaagttgagacagtgcctacatagagccttcaccccaatgttctgctgcctttggtacaggaagataccctgcattaccaaaggagaaacctaaacaccaatccagccacaaaccctttgatttacaatagtattctgcccgagacatatgctagtgcaatggcggcacaaagcatgtgggtataactatgcaatatctgacttgagttaagaccctctccacaatactgctttggtgaccaaggatctagatagcccaggtacctaggattagacaaaatattactgttctaaaaagcaagcaagcaaacaaacaaaaacctagcaataaagtgactcctaatggcattctgctatactctgggtaagtgccttgctcagtcatcatcagagaagcttcctcctgcagctgatgggaacaaaaacagagacccatgggaaacattaggcaaaaaatgaaagaccttggaatactgatccctaaatgggatgtctccatcaaatccctcctctcagggctcagaggatcctgtagaagaggaggtagaaaaataataagatccagaaggggtagagtataccaagagaacaagcccctctgaatcagaagaatcaacgcacttatgaactcagagactgaaatggcattcacagggcctgtatgcatctgcacctgtagctgaaaggagaagtggacacatgtccccatccctaacccagaagctgtctccaattgataaccacttgcaaatggaaatttagtttcgtccaagggagtctcactggggaaacaaactactttaagggtagcctgcatgcccagcagtagatggccaacagaaaatgaactcaatgtcgtctttggaggttccttgtctcataaaaatcatttaaaattttttcttttaaaattttatcttattttaaattttaatttattttgtgttttccctttgcatctatattatggcttccagtttagtttttttttttttttttatgggattccttagtgtacaaatgaaagggtctcagcaatatatgtttcttttacttttttccatctgtctgttttgtcttatactgatgtgttattttttgttttatcttatgtattattatcccatacaagcttgtttgttctcttctaatgagagacagaaaatgggtatttggatgggaggggaggaacgaggaagagtagagggaggggaaaccataaccaggatacattatgtaagggggaaaaaaatctattttcaataaatgggaaaaaaggaaaaaaaattcttttcctgtcagtgtgattcatcattaacctcagttaaatggtgctaatatataaaaccccattcaaaaaagtattcaactcggaagtggtccttaattaggtttccttcccagacttgggcaagaatatgtcagtgaattggatgaaatcacacgcctattaaagttgtaggtggtaaaagttttgtgtgtgggggccacacgattgctagagaaaatggcggtctacaagaggctctgcaggtcggaggagcgcaggagaccctgcgaggaggagaccctgcgaggagccggaggaaacactgctaggtaaggtccacaagcaggtcctggttctcaatggactaaacacgtggaaacaggccaaggtgggcagaagtttccaggagacatttcaaagtgtgatgtggtcaatggtggaatgagattcagagaaagctttctgtcccatgttcgcacaagtattccaaaagctgtgcttttgaaggtattctttccactgttgggaaagtagtgctagctgggctacatgcttccagctcagagaggtgattatgccaacaaggcactcatacactgtcaaggatgtgattcatctcccagagatgacttttctctccttttcttgaaaatataaataatatatgcagtgtgtttatttacagtaatttaatattgttaaaaaatactatcttggcatgggaagaattttcattgtacccagtatactattggttgagcatctaatatcagcaataatttataatgataatagtgaacatatataggttttgtgtaagtcattggtctcagaacatattagtccatttaaaaatagttacagccttgtaagcaaggttacaacattatccctaatttacagatgaagaaacagagtcacagtgacgtcaagagacctcagactggagcagtggtaagtctctaacctgtataatttatatttggattgccactctcagcaataatagcaactctttgtttcatgggaaaaaaaaaaacaagcttagaactgattatccattaggtacaatgactgcttacaatccataatatatttagggactgtcttagttagggtgacttttgctgtaatgaaacaccaggaccaaaagcaactcagtgaggaaagagtttatttttctcacaccttcacaccacagttcatcatccatggaaatcaggtcagggatgtgagccagcacctggaggcaggagttgatgcagaggtcatggatgagtgctggttactgacttgctccttagagatcgttcagctgctttctttttttttaaataaatatataaggtgtttattggcataatcactggatgcttgcaatttgagaaggcacagcagaaagtataaatgaatagaaaatgttaaacatttcaagaaacttgcattcttctgcaacatttgtttttaaaatgatatcaagaatttaaacctgtgcctatagatatggtagattgcttgatatatatatccaaaaaatggaatggttaaaatatcataggggttcagaggcaggaattcccatgtcaacctgcagtgttaagccaacccaagtggaggggatttgattccatctagacttatgtgacttgcattgaatcccaagtacctctgtgcataaagaagattagataagaaattgccattcacacaagaaatagtttatgtattggtagttctagtttttcagcatgggttgttaaatacacagcttcataaagactttttacttggaaaatatacctactttagaaagcaagcttactgattcatccatcactcaaaagattgtacttgttgcgggggggggggagcggcactaattcagcagatacttacaaacattacaaaaagtaagtacatttgtttatttaatcttaaattttttattcattttatataccaaccacagttttccctccctcccctcctcctgcttccccccacctctctcccacccccacatctactccccagaaagggtaaggcttcccatgaggagtcaagaagcctggcacatcaagttgatagcctgctttcttctaaaactcagggtcaccagctgatgggtggccccacccacaatgagctgggcccttcccatcaactactaagtaagcaaatgccccacaggcttgcctatagatcaatcttatggagatattttctcaaatgagattccctcctcttgtatgactctagtttgtgtcaagttgacattaaaagctaactatcccaggggcctgtgaaaatatttaacttctcttaaatttaggagaaaaatgaaatcatgacatttgcaatgaaatggatgaagctgtaagccattatgttaagtgaaataaactatactctaaagacaaacaccgagtgatttctctcatatgtggatcccagattttaatgtgtgaggctgggtctgtgtctgagtgtaagccgtgagactagaaaggagaccatgagaggagaaggagagaacttaagtgagggtgtgtgaataacggaatacatgtgacaggaaagcaaagaggggagagtatgcgaagagaggaagagagccacaagaaggcgcggggtggggggggagatgaataacgaagtctatatgaacactccataatgaaatccagtactttgtatgctgactgaaaataataagcctggaattgaagaaaatattttgatttcttttgttttgggaaaaaaaaaaagccaaaccgaccaacctaacaaaacaataatctctattacagttagagaaccccagaggccaatatgcaccttggaagatctaccagaggaaatttcaaaacagctttcttggaaaaggcagtattgcaaccaggctttggggatagctgtgcttgtccatcctttgcaatgacagcaaaagaatagaagggacagcaaaggcatctcagagacaggtaaaatcactgtcaacagcaacaaccaggaagatggggtgggtttgctacttcacttgcttgctggcaggatctgacctcagggcagctgcagggaaagcaccctgagtcagggcaggagtgcaaaacccactcgatgctgcagagtgtacagtcttgtctggaaacagaataacactgtggagagccacacagaggcttgtgtgtggaaggcatcctacgtgcttgtcaggaaaataacattggctctgggctggtaagtgtggaagggtggctgatcttttgcaaggcagaaataaaacacttcttagagatggaagtatgcaggcaaggaaggcattttcccttgtgggaatgtgatctgctatgttgaagactattccagaagcggaatttgcaggtatgaaaggccctagtgtatctaactgaaaaatgtgaaagctacccagagtaaactacttgaaggattagagatgagtttcttttaaaaaataaagtctatttcagttctactcagttgttcaatttaataagcatgtgtttgataaaatcccaagggtggagacatataattattagaactcaatgaacactcacagcaaagaattttgaaagaaacattttcatggtgacagcatcatttcttgttgatgcaaaggtatgagagacctctgcccctgctctgttcttccaaaatcccactctaaaacactgtccttgaagtctctcttcttctggtactgagcctgcagcccacttgaactcatttcacttttctctagggagtgttctctgttttctacctaatgcatgggaggttgaccagatgcctctatgaaatacagtcatggtagcctgacccagttcaagaagggtagcctggggctagggagatagtgttcaaacttcgacactaattttcaaactctgatgccatagtttgtacctataatctcagctctgaggaggctgagatgggaggacccaggggcttgcttgccatccagtgtagccaaatctacaagctccaggttaaatgagatactctgacaaagtatggtggagagcaattgagaaagatacccgatgtcaacctttaccgttctcacataaacatgtacacacacacacacacacacacacacacacacacacacacacacacacacacatgcagggtgcactggtttcatctttctcaggctccttcattcatctaaaatatacttcagatagtttatataaataatattttccccttaacgagacccacccccaggtgaagagtatagggaattgaattctcccacctagactgacaatgctcctgataaaggccatagagtagctaacaaaaaccccaattccaggcatgagaagtcaccctttgaattgtttatcaggggaatccaagaaacttcccaaacattatatataggctattgctattgcccttggttgtctcccagaagttgaaggtaagtctctacctgctgaagacgtatgcattcagacacaagacccagaggatctgagctgggttctaacctgaaagcctccctcctctctgaggtttagctttcatgatagtagaagttgtcacagacgtttccaaaggagggaagcaatcagtaactctacccagatatgatgcccatgaaccacaataacaaatagcgtggcatgataaccctagagttgcaatagtggcactcatatcttggtagtaactaatagctgtctaaattggacttaaagccctgctcaataacagggagataatgtctggtactgaaaacctagtcagttacctagggctagtgaggtcatgattcttggcaaacctactaccatcactttactcagccagcataattcctaatgacattctaaatatttatccctagacccatagtgtggtttccacccctcatcaaagaaatttctctttgcaataaaggagaccattacagaaactacaactgatcaaactgcattgaacaagtgattgtgtggtgcccagccccaacggatacatctacaacatacctcctatacctaactaagactcagggaacaatgaggaagaagggaagaaggattgtaaaaacagctataggcaattaatgactaatgaaggagaattggccttccctagagttgagccccatagatttcccaagcttacatgatcatccttaagttcatatacatatgaacaacactaaatggactcatcaggttgtatttgcatacacatatgtatgtatatatgcatgtatgtatgtataacaagaagaggtaatgaagttgagagggagtgggggcatgggaggatttggagagggggcagatagggtggaaacagtgtaaacacaatagccatttatgagattctcagaaatagcaagtattggaaaatattttccctgatcctccatactccaggagtgtctctagttatagataagaaatatttctcaaaaggagctaagaaggggaagtcaggaaggaatttatgatgtatagcttggaactatgttgcactataaagttgtctgtaaattataaaaatattaaaactgcttccctataattagatagccaagagggttgtttagagtcagaaatgtaccctctggaccatttcttagccaatccttgtaatatcattgttgacaagatagctgtgtgcctactgcatgtaggtattccactctgtatttaaaaatagcattttatttattacaagaactccagaaagccattacaatcacccatgggcttgaatgtgcccatgattgtcaatccaacaagtggcattggattgaaggccagattcagaaggcactcgtggatctgcttggttagggactcctttgctctaccaggtctgcctgccagcaatgggttcaacattatgcatgactacaagggcagaatgcatgttcaacagtcctgtgtcccactggctcccgccttacatgcctgccatggtaactggacttctggttcatttcctatggcaatgccattgccttctccccgcttttggcattataacgagttacccatccctcttctcctgccccaccaatacacctctgttccttcctccaggaggcaggaggattgctataaggccatagaacaagcagtagcatgatagccagggatagatagcgagaccctgtctcaaaaaatgtttgtgaaatttctaagaaagagtgtggttggagagatggctcagcagttaagagcagtggctgttcatctagaggacacaggttcagttcccagcacccacatggcagctcacgaccatttgcaactccagttccaggagactcaatgccatcttctggcttctgagggcaccagacacatacatgcaaaccaaatacttatacacatagaataaaataattttaaaaggttagtgctttaaaggccactgtgtagaaagtaaaaagccacagaacaagcagcataaatcatatctgataaggtctagtatccacacagagactatataaagaactcttaagtacttagtagtaggaaaaccactcaaccaaaaattagacaaagaatttgctaaacaaatttcagggacatgataaatttctcaaggtcattagtaatttgataaatgtacatcaaaaccacaatgagataccattcacaaccatcatgatgacaataatcaaatagacagaaaatgacaaatgttgacatggatttggaaaaactggaaccctcatacattgttgtgggggcagtgaggttataaaaagctgtaaccattttgcaaaatgtgtggcaggtttgttttttaaatgattaaacatttagttagtacatgggctagcaatgctacccttattctaatacataaaataaagaaaacataaatccaaaaatattgggcagaaatattcaaatcacaattattctttataggttcaaagtagaaggaattcaattagccatcagttgattaagaggcaaagaacatgtggtccatccattcactggaacattatttggccctgaagaggaatgaagtacagatacacactactataacacagataaatcttaatataacattaatgaagcaagaaacatctgtatcacatctttatcattccacttaggtgaaatgtccagcaaacccatagagacagaaatgattactggtcactagaggctgagagaggaagggagtttggggtgactggtaatgatgagtatgggtttcttttgagggtaagaaaaattaggtagtgataatgtataatgtgataatgtataacttgctgagtatagcaaaaaccaccaaaataaaaccttaataaaataaaaaatggtattatagtaaactgaattgatccaaacttttgaaccaatgattgatttttttttaaagaagtctatttcatcatatgactttttgctaaagcagagatgtttgtgctgaccctaatttaaatgtgcctttaagatggtttaatgtttatcttatcctttatacacaaagtattgtccagtatacacaaaatattgtcactttatttgttttttgtttgtatttaatttttcagacaggtctcatgtagcccaagctggccacaagctcactgtatagctaaggatgaccttgaacttgtgattcttttaccactacctataattataggtatgctcctgtaactttatgcagtgctagtggctgaagcccattcttcatgcatgccaggcaaacactatcaacctagctacatccccagcccacattatatatatagtaatatcagtgaaacagttaagcaatataatttctagtgtataggagatgcatgcacaagattttctgttgatgggagatgagagccacaaagggtttgagaacattttgccaatgtcttatcaactgagaggaaaaaatctcagggagattgacatcataaattctgagataatttacatatataataaaaataaatctgagtgtctctattggaaattttatatgtgtagtttattaatttgtcactcaatttaattcatcctgtgctgacaacttagtaagtttccacagaggagggtcacacctcacagaccatgtactaaaataagtcctttgagaataatgacgtgatagttttcttcagccatgtcgctgactgctagccaggtcctggcaccctttcccaattcagcctcagtcatagacatcgttgtctggatcgatgtctggtttctttcaccagcttgtcctggaaaaagacagtggtgtccctgtagtctgtggtctgtctcttcaaatgtttgcctgacctcgttatccagaatggtctccaagtgtagcctgcctcacagcactgagtctcaaaaggccagggtactccctttaaagtgacaaagcaaaatagaaccatctgtctagccaggcttggaaaatactagagccaggttgctctggttttaaagaaaatttataagccggcctctggccgcaaccctgaaacactgctggggaaacttttatacaatattcaaaggcccagaggaaagcctgcttcattgccacaaccctgaaacactgctggggaaactattacatagtattccaaagcccagcttcgccactggctttcctgctcacagggcactctgcaggagcagtgaggtcctgtatgagtggcacaggcttagggccagcctcttagcccatgctaaagtattctttttgtcatggtgctcttgcaggaaatatgtccagagaactcccattaaaagtttgtatctgtgggctggagagatggctcagcagctaagagcactggctgctcttccagaagacctgagtttgatctctagaaccctcatgtcggttcacagttgtttgtaactttagtcccagagaatccaaggacagcagctacacccccccacacacagtaaaaatagaacttaattaaaaaaaaatccatatccatttcctgtcccagggaagcctctcgtggttctgatctttgctgtgcctatcttgcagatggagacaaagggaacagctgtgcaactaacatggcaacatattggaaaacagcactgcgcttgggacatcgtaggcattcaatgaacactgactgtatctagtttggaagccagagatagcatctctaaactggattctccttcttatgccataagcaacactgctggcactgtgtgtacagcttaccaacgggtcaacagctacatagccttcctcttagaaagacatagatttttattcacatggtgtttgagcttcagactccccgaaggcagaatttgagataaggctgcatgtatgtttatttgcaagttgacccagagaaagtgggtcagagaagggtgtattatcaagattaccactgttacctagacccctccccctcatcctcaggctcttccaggaagcgtgcagaataccttgatggctgggatgtaggagcattttctcactgttttccatccttccctgggtagatttttctttctgaactgatcatgttcaccagctgactcagcacccaggaaagcaagggagagaaagcaactgcatgggcttgggaaggaagcaagaaagggttggccaggaccaactaaaagttggcagtgcagaattaaaggcaaactgaagagggcagggctctttgtctataaatgattgagaatttcaaggcagcaccagcagaatgctagtctaagcatggcccttcccaaatgaggagtcacatgctccaagaagccatccctcattccacccctggttgaaaatcaaagcaaggccaaggatcataaatgtcaaacacaggtggaaatgtatacccagtatgggaggttgaactgaaatgggtctcagcccatcagggcgagttcattacctccctatagtgtttggctggagttagtcatgctttactcagcaaggtgttaactgggaagcccagtcaaggatattatgtgcagagcagcaagccaagattttttccttttctcctctctctgctgttatcagtgctgtcctgtgaggacataatggtgtggactattgtgttgctatgagctatcactgctacactgaggacagaggtgtggaaagggatgaggctgtggaccttgaagaattctaagttgctggtccaccccaatgaagaccgataactgttacgaggacaaagtcaccagcaactagaagcatttctaacgtatgcaagcctcctctcactggtacattcccatgcttttttgagtcacaggacacatggttatctgtagactgactttgattcggccagggcagacacgagttaaagaagcaaattgtcagtgtcattgacagagcaaatgaaagacacattagaatcaccttccctctccatataatctttgtcgtttgcctctacacactttccagtgttcttcacagagaggaatgggaagagaggaaatgaccactggttctctctgcccaccagggggtgacttaaactgtgactggcttttattgaataagattgaatcactgaagttctgtaggggatagtggttcatttacctgcctctgcctgactctaaggagttgtttagcctcctgtgtgtagccttggtgaaccagttcagaaccaaagaacctggatctcccttggcaaaggtttgggcaccaatccagaggccaattggattctttctccagaaagcatcaatcccaatggcggagctccctccattcttgctgctttgtcttgggttccagaaggtcaaactcaagagtctgtgatctatcccagttcttacatacgcagatacacatgtacacacatgcaagtacactcaaacacagacccacactcacagaaacacaaatatgtacacatgcacacacactcaaatgctcatgcaaagcatgcatacacacacacacacaggcacacacttgcacacacagtctctctcatacctttgccacgaaagaatcaaaggcaaacttcaatctgaaatttaaaggaaacagaaaacgtagattcctgtgtactctatgttagtggagggcacggcaggacgctgattgtaaaactggccccaattgccctaacttccccttgcatggtgacttttaatccctacctacaaaagtggaatctatattttaccccttgaaaaaaaaaaaaatatatatatatatatatatatatatatatatatatatatataatgtttcagtgtcctgtgaacaaacatatactatcctgatgaagaatgaaagacatggaacagaattgagtcattctagccatcctggctaggctctaaaactctgagtaagcccaaccctacaccagaaaagtagcctataaacgaactccagctgactgaagattcatgaggtggcttagtcacaatgaatagaactatagagttgatgataaactcctgagcaataattagtcactattttaactctgttgggtttggaatagtttgttacacaggaataactaacagcatataagagccaaagagcactaatgctcagccagttatcttttttttttattaattcaagttagggaacaagtttgtttcacatgtaagtcccttctccctctccctctccctctcctcacccccatccctcctcccccacccccatgctaccccccaccccatctacctacaactccccaggcagggtagggccctcaatgggggctcttcaaagtccaacaaatcttcctgtgctgggcctgggcccttccccatgtatccagggccagtgtatcccttcacatggtatgggctctcaaagtctcttcttataccagggaaaaatgctaatccacttccagaggctccctggagtgcagaggcctccttattggcatccatgttcagggggctggatcagtcttgtactggcctcccagatagcatctgggtttgatgtgctctcccttgttcaggccaacaatttctgtgggtttctccaacctggtacagaccccttcgatcttcattcctccctctcttcaactaaattcagatttcagctcagtgtatttctgtggatgtctgtctcagcttccatcagccactggatgagggctctaggatggcataaagagtagtcatcaatctcattttaggggaagggctttcaggttatcctctcctccattgcctggattgtcagatcgtgtcatccttgtaggtctctggagatctccctagttccagatctcttctcggacctatagtagctccctctaatatggtatctctcatcctgctgtctctcctctattcttccaccaactcaatatctctgctcctccatttcctctcctctactcctcttctcatgctcttattgtggaagcaccctctcccctaccctcatgctccaattagctcaggagtccatgccactaaccattcctggggtctatttatcccttagagtccttcatgtttcctagtttctttggtgaagaggattataggctggtaaacctttgctctatgtctaaaattcatatatgagtgagtacataccatgtttgtctttttgtgactgggttacctcactcaggatggtttcttctagttccatccatttgcctgagaatttcaagattccattgcttttttctgctgagtagtactccattgtataaatgtaccacattttctctatccattcttcagttgaggggcatctaggttgcttccaggttctggctattacaaacaatgctgctatgaacatggttgaacatatgtccttgttgtatgaacatgcactatttgggtatatacccaagagaggaatggctggatcttgaggtagattgattcccatttttctgagcaaccgccatactgatttccagagtggtcttacaagttcacactcccaccagcaatggaggagtgttccttcttctccacatcctctccaacatagattgtcattggtatttttgattttagccatcctgacaggtgtaaaatggtatctcagagttgttttgagttgcatttctctgatggccaaggattttgaacactttctcaagtgtctttcagccatttcagattcctctgttgaaaattctctgtttagttctgcaccccactttttaatttcattgtttggtgttttggtggctagcttcttgagctccttgtatattttggaaatcagccctctgtcagtgaagatcttttcccattctgtgggctgtcgttttgtcttactgactgtgtcctttgccttacagaagcttctcagtttcaggagatcccatttatttattgcagacctcagtgtctgtgctactggtgtgatgttcaggaatcggtctcctgtgccaatttgttcaagggtaattcccactttctcttctagaagattcagtgtggctggatttatggagagatctttgatccacttgcacttaagtttcgttcatggtgacaggtatggatctatctgcaatcttctgcatgtccgaatccaattgtgccagcaccatttgttgaagatgctatcttttttccattgtatagatttagcacctttgtcaaaaataaggtgttcataggtgcatgggttaatatctgggtttttaattcgattccattggtctatctgtctattcttgtgccaataccaagctgttttcagaactatggctctatatagagcttgaagtcagggatggtgatgcctccagaagatcctttattgtaaagaattgttttgtctatcctgggttttttatttttccatataaagttgagtgttgttctttcaatgtctgtgaaaaactgtgttcggattttgatggggattgcgttgaatctgtagattgcttttggtaggattgccatttttactatgttaattctacctatccaagagcatgggagattttccattttctggtatcttctttaatttctttctttaaagtctcaaagttcttattgtacaggtctttcacttttttggttagtgttacccccagatattttatgttgcttgtggatattgtgaaaggtgatgtttccatgatttctttctcattgggtttatcatctgtatacagtagggctacagatttttttgagttaattttgtatcctgttaccttgctgaatgtgtttatcagctgtaggagttccctggtggagtttttcgggtcactaatgtagactatcatgtcatctgcaaatagtgaaagtttgacttcttcctttccaatttgtatccctttgatccccttttcttgtcttattgctctagctagaacttcaagtacaatattgaagaggtatggagagagtggacagccttgtcttgttcctgattttagaggaaacgctttgagtttctctccatttagtttgatgttggctattggtttggtgtatattgcgtttatcatgtttagatatgttcctgttattcctgttctctccaagatctttatcatgaagggatgttggattttgtcaaaggctttttcagcatctagtgagatgatcatgtggtttttctttttcagtttatttatatggtggattacattgatggattttcatatgttgaacaatccttgcatccctgggatgaagcctacttgatcgtggtggatgatttttctgatatgttcttggattcggttcaccaatattttattgagtattttagcatcgatgttcatgagggatatcggtctgtagttctctttcttagtcatatctttgttaattagcatgctctctctctgccttttggttagtttagctagaggtttgtctatcttgttgatcttctcaaagaaccaactctttgtttcattgattctatgtaatgttttcctagtttctactttattgatttcagctctcaggttgattatttcctggcatctactcctccttggtgagtttgcttctttttgctctaatgctttcagttgttttgtcaattctctaatgtgacttttctccagtttcttcatgtgggcacttagtgctatgaactttcctcttagcactgctttcagaatgtcccataagtttgggtatgttgtgtctacattctcattaaattctaggaagtctttaatttcttttttttttatttcttcctcaacccagaaatggtgcaattgggtgttattcattttccaagaatatgtaggttttctgcctttcgtattgctgttgaattctagctttaatgcatggtgatctgataagatacagggggttatttcaattcttttgtaactatggaggtttgctttgctgcctactatgtggtcaattttagagaaggtgccatgtggccctgagaagaaggtatattcttttgagtttggatggaatgctctatagatatacattaaccccagttgggtcataacttctttcagatcctttgtttctttgttaagtttctgtctggtggtcctgtctagtggcgtaaggggggtgttgaagtctcctactataagtgtgtgtggttttatgtgtggtttgagctttagtaatgtttcttttacaaatgtgggtgccttcgtatttggggcatagatgttcaggattgagacttcatcttgatggacttttcctgtgatgagtatgaaatgcccttcttcatctcttttgattgattttagtttaaagtctaatttgttagatattaggattgctacaccagcttgtttcttaagcccatttgattggaaaatcttttcccatccttttactctgaggtatcgcctgtctttgaagttgaggtgtgtttcttgtaaacagcagaaggatggattctgtcttcgtatccattctgttagcctacatctttttatgggtaagttaagaccattggcatttagggatattaatgtccattgattgttggttcttgtttgttttggatttattgttggtggtgtcattgtgtgtgtatttcaccctcctgcttctttttgtgtttggtaaaattagattatctactgcctgtgtttttgtgagtgtagttatgttcgttgggttggagttttccttccagaaccttctgtagtgctggatttgaggatatgtattgtttaaatctatttttgtcatggaatatcttgttttctccatctatagtgattgaaagttttgctgggtacagtaatctgggttgacatccatgctcccttagtgcttgtatggtatctatccaagaccttctggctttcagagtttccattgagaagtcgggtgtgattctgattggtttgcctttatatgttacttggcctttttcctttgctgctcttaatattttctctttattctgtagatttggtgttttgattattatgtgtcggggggacttctttttgtggtccagtctgtttggtgtcctgtaagcttcttgtactttcataggcatatccttctgtaggttggggaagttttcttctatgattttgttgaatatgttttctgtacctttgagcagtgtttcttcaccttcttctatacctattattcttaggtttggtcttttcacggtgtcccatatttcctggatattttgtgttagggatttgttggacttgaggttttaaaaatatggaacacttcacaaatttgcatgtcatccttgcacaggggccatgctaatcttctctgtatagttccaattttagtatatgtgctgccgaaatgagcactcagccagttatcttgttaagagtttatcaatactctgcatgcataatttcttattgagatacccaaagccatttatgcatttgtttatttagacaaataacatggctcatctctacctgtacatattagacaaacaaaactttagaaaattgttctgtctgaatggcaagaactattttttttctgtcaatagctgagccatgagctaaaccatgtttaaagaggtcactgtcggctttaagccaggactagggttaccactctgcctacctgggtttgatagcattcaatagttactcatgtctaccagcgagcctggtgattctctttaagaccagaataatcttacgtttatagtcaaaccaaaacacatctcccacctaacacactcagaaatcctgattcagttctaggattacttgggaaaccatatgaatagccatgtataaaaagggggtctgtcagaaacaacatggttgagtgaagccactcacatcatagacaagggcagagtttgatttttttctccctaggttttaaaataaactttggagaatctgtactttaatctcacatattataccagtagtttctacagttcattcaatagttaaccatcatttttattgcacagattcttctaataaatgtaattttgaaatgtcattaataacttgacttatcaagttattaataatcactggaaaatattttagtgattcacttgagtcatatattgtcccaaacagaatgaaaatccccttgtgaaacaggttttctgatgacaaacagacatctgccagtgtcaacagttataaggccaaacaggcacactgcttcttgataaatctgtttattcctgctgatacctcgacacaacaatttttctgaaacttacagaaaaataaataacccatcaagttgcttaaggttaacatttagcactgtcaatctattattagcaaagtccttcgcccagggtgagggaagatgtaagttactcatacatctctaagaaaattctagcaaaggagcagagcaaatggtaagaaaatctttacaaaataaggatatgcttaggaagaagtggaaaataaggtcaacagtgatgcaaccatggtacattttatttttctgctctttcctgaagttggatacttctctagtatccaaataaatgctcattggggctaattggagccagctgcccagtgtttggtttttagtccatattgagtaaccgtctagcaaagcctggggcttttggaagctctagtgtctttcgtctcacagcaagcagactacagctcctaaaggggggcgaagttaaatctcctccaaagcaaatacagctcaccagattgcagtactcagatttccaacagccaacgctgagtctacactacttcctgccgctgatgttggctcactatttatccttcggattagaaacccgtggataccagaatccatggccacctgttctacatgtcctgtcttgtctgtctggtcatattccatctccaaacctatgtcttaggtaggtctgaaggggaaaaataaagagaataacttcccagcccttctccaaagggatgccatttcttataatactttctaagaccagttctcatcctgtgggccgcgaccctttgggggtcaaatgaccctttcacacaggccacatatcagatatcctgcatatcatatattaacattatgatttatagaagtagcagaattacagttatgaagtagcaataaaataattctatggtctagggtcttgtattaaaggattgcagcactaggaaggtttagaaccactggtctaagatcagtgtccaaacactacacttttgcaaaaatggtaaactagtgaagtggagagcatcttcgtagctccttccctagaagcatcaggcacttggggcatcgttctaattcaatgaattcataaacaaacttgtttgcttggtctctgaacatgctggactggaaagcaagtgtcctagtgaagagatcctaggagtcctcaaagaactataatcaggtggcagtgaatgccaagatgtggtggtatattgtttatactttatgaaagtcatggggatcaaaatagcaaagcagcccatacctgtaagccatagaatccaggtgcacacctttaattccaggactcaagattaagaggtagacggatctctgagtccaagaccatcctgggctactggagagtgaatcagagctcacgcctttaatcccaggatttgagaggtataaaaggtagaggcattcagtctgagagttagtctctagccacgttgaggagagcctaaaaatctgagtgaatctgaggagcagtgaagttgggagcagttggagaatcggccctctgatctgagctaaggtaagagctagtggctggctgctttgcttccctgatcttcaagcctgaagagcaagcctgtagtcacagcactcaggaggtggaggcaggtggatctctgtgagttccaggccagcctggcacatatgcatactcactcttgctttcattttctgtttctctgtctgtcaaaaaagaataaaatgcaacttttaaaaatgataaagaatatagcaataaatccaaatgaataatacatatccacaattaggagccaaaacttcagaaagtgttagcaggaggctggggagagaagtgtcctgtgcagaggtcttaaccacttgaatagacatttagacattagtgaaagtcaacatttaattctgttttaaatgttcaaaggaaacatttgcatccatatatatataaaacaacagaagaagaaaatatatgtaaaagttaataatattaaaaaatgcaacgaaagtcaggacaaggagaaaaagagccagtgaatggcaaaaccaaagtcatgaaaacaggttggaaccagcaacaggctgggagtagatgaacggcaagcctgagccgccccgcagctgtgagtcaccctttgacagaagcacctctgagggattttacgacagcatcccaagcctccgaatcgacctagactccctgccaagtgattgcacaggttgacttcctcctcctgtgtatccatttctacaatgtgttcaattttctttctcaagacttccagtgcacaaataaaaagaaatcaagaggacagttggttgctttgtgaagctctctcaccccactcactgccttcaacatcctgattttgtgagccgtcagatctatactagaaaaaaaaatcagaaaaatatggattatatcagtgcaacaatttgcctctttggatgtggttcgtactagagtcatgaataaagatatattcctagctctcgcttcccaagttgcttaacatttgtgaacctcagattagcacctgtagaattgtgtgattccatttccaaggccattaactcagcatcctgggcagacactgcctgtcatcattaggcctagtggggcttctcacacacccattcatcagtttacaaagcatattagctaactattggtctgcaacaaatcactgcaaattttgaaacttaagaacttttatcgtcataaattctataaatctactcgaggctttgctgataacctcagaacaggaagcatattcatgaagcaaagcaatggccccacagctaacaccttttgagttctttctatatcccaggcacaccagatgcattctttgcaatatgtttttttactttttcgagacagggtttctctgtgtagccttggaacctgtcctggaactcactgtgtagaccaggctggcctccaactcacagagatcttcctgcctctgccttctaagtgctgggattaaagtcatgtgccgccaccgccgggcttatttttgttttaatcactccaaaagtaatagattaaaaaacacgaaaaaattagtagattacatttcaacagataaaatgctatatcctgcccatgggtaataaactaaactggaactctagcctagggcagcgtgactcagacgcattcctggaaatcactactgtcgttcatttttagcagttcagattaaagatgaaatgaagtagagggcacaccactctgaaagtaagaggccaagtctcatagaaaactcttgctccacacacttgtgcatatgggtttcttcacttgtcttactgctttttacactttggtctcatatctctttcttgcgtgttttttttttttttctttatttccaggtgagacttccatcccagttagagtcctttcaaaaagagtgaaaagacaacctacaaagtaagagaaaatacttgcaagtcacatatctgatatgttgttaatatttgcacatataaggagcttctacacttcacaaaatcaactggacttaaaagtggagaaagatgttatacagctatttctccaaaagccatatatgcacacgtaagaagctcaacagaattaggaagtgggtaattgtaatcaaatcccaatgagctaccattccccctccccaagatagctataagttaaaaggtatgcaatcaaagtgttggtgtcacttcctgggggagacaaacagtatgtacccacttccctaaggtcccaataacagaccaaagtatatgctatcaacattcactttgaggtaccagtaaatcgattggactttcttaacgagcataggtgagggttatttacaggattattggggttccccctataaaagctgcccaaaaaagtctttacccagcagggatggtagctttttgtatgtctacatagagagaacccccctctctcccagcttttctctatctatgtattctagcctttccccaagatcccagaggccacaaccaattagggcaaaattgcaaacaactgtttgggagaggtggctggctactcagaggagggtcccaagatcctctctgcccctctttctataagaaaagttcaaaagtcagctcggttctaaaggagctcagcagaaatgatgtcttccaagcagttcctgctgaactcctaaagatggtagcagtttggctcagcgaataagtttagacaacagtgggtggataggcagaggaactggaaatcttgtacatggctgaaggaaggtgaaagggtgctaccatgtttagtctattcctcacaaagttagtcatatgactcagcaatttacttttaggaatttactcaagctgaaacaaggactcgagtatctctttgtacagctgtgtttatagcagcaatattcaagtcaagggtgaaaagaactcaaagtccattatcagatgaatagactaataccatgtgcttgcccacacagtagaaggtcactcagccatgaaggaagacactctcagggtgctacaacatgaatgaaagcacagggaataaagtagacacaaaatgaaaatctatgtagatttctcttgtgtaaaatatgaaatatttagagtaggaaaattgatgagggcagaaagattagaatttttgaagcaaaaatagagttattgcttaatgatcagactttctgtttgggttaatgaaggttttggaaatcatgtcacagctttaacaactttgttgtgggagttgtctatgattggccctcataagctcatagggaatggcactattaggaggtgtggccttgttggaataggaatgtccttgttggaggaagtgtgtcactgttggggtgagatttgaggtttcctatgttccagctatgcccagtgtcacagttcacttcctgttgcctgaaggtcaagatgtagaactctcagcaacttctccggcaccatgtctgcctgcgttccaccatgtcctgccatgatgatactggactaagcctttgaaactgtaaaccattctaattaaatgtttttctttataggggctgctgtggttatcatgtctcttcacagcaatagaaaccctaacaaagacacttggatatttaattgattctaccaaactgtacacttaaaaatgggttgaggatagtggaatggctccataggcaaaaatgcttgtcatgcaagcaacaaggacctgagtttgaatagccaaaacccatgtaaaatctggacacgaattacaagtgtgtgcaattccagtggccccatgggcagatggcaggtggatgcctgctgtacaaaacaggaaaataaccaactgatcttgtctcaaacaaggtagaaccaaagtttccctatgacctcctcccatgcatcatactgtatacactcgcacacaaaatttaagaaatggtttcaatggcaaattaatgcatatgctggaaatgtatttgcacatgtatgcagtaatgtgcacctgtgtgtgcctacagaagccaaagctcaatgttgggatgtctttctgaatcactctctaccttattttccaggacaaggcctcttagtgaacgtggagctcatgcctacagctacactggctggccagtgaaatccaggtatcctcctgcctctggccacccaatcgagttacagatgttcagggtcatgcctgacatgggtgctgagaattgcaacttgggttctcatgctcgtctagcaagcactttacccactgaaccaacctcccagccccatcagtggtaaattttatgccactcatttttaactctagtaagaaaaacataaactcagcgacgagtcttaccaaagagaaactgggttaaaatagcctatctttactcaaatctgagctcactagaggaaatgttttttttttttttttttttttttttttttccgaggcagggtttctctgtggctttggaggctgtcctggaactagctcttgtagaccaggctggtccccaactcatagagatccgcctgccgagagataacccccatctgaacgggtttggccctccccatcaatcactaattaagaaaatgtcttactgctggatcttatggaggctttttcttcattaagattccttcttttcagatgactctagcttgtgtcaagctgatttaaaactactcagcacatccatgttcttaagcatcattttagctctacatggtggtacatgcctgcaatcccagctcatgggcaacttcgatcaaaggactaccacaagttcaaagacagactgagtcgcaaagagtacactaggacagccttggctacagcagtacatgtctaaaaacaaagaatccttttcagagaatctccatgtagtttcaggtagggaatatactcagtgtttcgtattcatgaatgaagacagaggaagacactcaagttcaactacatgagagttccacacttcctatcctcactaataaccaagccttggaaacattactttgatttccatttagctcatgtgtgaagtcagttgtccccttgtcctggttggatttttctcaacctgacacaacctagcattatttgggaagaggaacctcaatgccttcatcacattgcctaaaggcaagcctgtgagtgcattttcttgattaatgactgaggtagaagggcccagactgtttttggtagcatatccctgggcaggttatcctggatagtgtaagaaagcagttgggagagagggccccgcaccttgcctgggcagaacagtagaactggccctggtgatgtgagtgaggggggcctggatctgaggatccctggctataggctgcattgggtgaagttgcccaagcattgctagagagttcataaaggtagtgccaatgagggagagttggcgagctgacaacccagccaccacccaagcccagaacaagggctataagttgtttcatcctaacatccaccaaatttatgaactgttggagcatgtgaaggggatgaacctacagatccaaaacagcaggatctccatgacacaggacaacaacaggatatccaagaggagcaccaatgagagtccactattggtggtgtagaagaaaccagaggccttgggccagaccaatgacttgtggtaacgaacacttgcaagtaaagataaacagactaaagggtaaactgtgtgtctcagtggaccacactacagcttccacgacaggtttcttcctttttttttttttttttttgatttgtttttgtttctttgttttgtttttggtttctcttttaaatttggttttgtttgggggcggggcggttgcaagggcagagggtggattccagaggacagggagataagtgggatcggaatgcatgatgtgaaatccacaaagaatcattaaaagttaaaaagaaaacagaaaaagaaagcaggctgagcaagccaggggagcaagccagtaaacagagctcctcttcttcagtttcagcctcctggttcctgtcctgacttccactcatggtggacatcaattgtaaaatgcaatgaactctctcccccccccatttgttttttgatatacttaattagatcatttattagtatgatatgataagtaacactcttttgttgaaaaaagtaaatttctcagaacacatccaattgcattagttccacattttattttttattatattcttttttctcttgaccagttttattagaagcaaattaagatgtattaagtcttaggggttttctggagggtgggagtgggggtagtcctccagtgcctcagcctcattctctgcttgtgtgaactatgaagttaagccagcagcatgaagtgccggccggcctttacagagcatacgttcagctcttagcatgcacatgacttcacatttccttgatttacagaagtcatgttaaaaatcctcttttgtgagccttttccttactaaagctgttcagtttgttctttgcttgtaccaactgctatcccttctcataggttgctgcaaccagtaagtcttccttgaaaggctttccgtaaatattacccagtaacctgctccagccattgagctatttaaagtcaagcacaatactccacagcgtttgagtctttcttccagggagccaccagacaggtaaaatgcacacacacaatgttttgcaaataaagtctgtactgctatctctggcacaaaagagctgtctcaagtgtgagctgtcttcttggttagtgagagatatggaagagacaatttaaactgttagagttccctcttgctgccctgcaatggtcttcctccactaagttctcttttctttgcttctggtagtttgatgacaactaactcctatttgtggagggtcagaatccagggattttctcctccgttattttagcatgctccagatttttatattttgtgaagatggcaataatcactcttaagctaaacagaaaagtcagttgatttcatgtgcaggttctcagatcattagccagtggtatctgctttgtctgccttgttcttctgacagaatcctagtaatttttggtagtgaccttgttttctgctataagatcttgaagactcatcatgtatgcttagtgcctgagacttgaaaaccatttcttcaaagaactccaaatattttccatggaaaaatatatttaaggaccaaaacatgggtagactatcatatcatctgcaaatagtgaaagtttgacttcttactttccaacttgtatccccttgatctccatttgttttcttattgctctagctaggacttcaggtacaatattgaagacatatggagagagtggacagctttgtcttgttcctgattttagaggaatcactttgagtttctctccatttagttttatgttggctgttggttgctatatattgcatttatcatatttagatatgttcctgttattcctgttctctccaagatctttatcatgaagggatgctggattttgtcaaaggctttttcagcatctagtgagatgaccatgtggtttttctttttcagtttgtttatatggtggattacattgatggattttcatatgttgaaccatccttgcatccctgggatgaagcctccttgattatggtggatgatttttctgatgtgctcttggatattttgttgagtaattttgcatggatgttcatgagggatattggtctgtagttctcttttttaattgtatctttgtgcgcttgggtatcaaagtaattgtagcctcgcaaaaagagtttggcaatgtccctcctgcttctattgtgtggaacagtttgaggagtactggtattagctcttgtttgaatttctggtaaaattctgcagtgaagtcatctggccctgggctattttggttgggaggcttttgatgactgcttctatttcattaggtgttataggtcgatttaaactgcttatctgatcttggtttaattttggtaagtgatatctatccagaaaattgtccatttcctttagatatttgaattttgtggagtacaggttttcaaagtatgacctgaagattctctggatttcctcagtgtccgttgttatatccccccttccatttctgtttttgttaattagcatgctctctctctgctttttggttagtttgcttggggtttgtctatcttgttgatcttctcaaagaaccacctctttgtttcattgattctttgtaatgttttcctagtttctactttattaatttcagccctcagtttgattatttcctggcatctactcctccttggtgagtttgcttctttttgttctaaagctttcggttgtcctgtcaattctcttgtgtgactattctccagtttcctcatgtgggcacttagtgctatgagctttcctcttagcactgctttcagagtgtcccataagtttgggtatgttgtgtctacattctcattaaattctaggaagtctttaatttcactttttatttcttcctccacccagaaatggtgcaattgggtattattcaatttccatgagtttgtaggttttctgcaatttgtattgctggtgaattctaatcttaaagcatggtgatctgataagatgcagggggttatttcaatttttttgtatctgtggaggtttgctatgttgccaagtatgtggtcaattttagagaaggtttcttgtggtgctgagaagaaggtatattcttttgtgtttggatggaatgttctatagatgtctgttaatcccaattgggtcataacttcttttagatcctttgtttctttgttaagtttctgtctggtggtcctgtccagtggtgaaagcagggtgttgaagtctcctactacaagtgtgtgtggttttatgtgtggtttgagctctagtaatgtttcttttacaaatgtgggtgccttcatatttggggcatagatgcttaggattgagacttcatcttgatggacttttcctttgatgagtatgaaatgcccttcttcatttcttttgattgattttagtttaaagtctaatttgttatatattaggattgctacaccagcttgtttcttgggtccatttgattggataatctttttctaactctttactctgaggcaatgcctatctttgaagttgaggtgtctttcttgtatacagcagaaggatggattctgtcttcgtaggcattctgttagcccgtatctttttatgggcaggttaagaccattgacattgagggatattaatgtccattgattgttggttcttgtttgttttggatttattgttggtggtgtcattgtgtgtgtatttcaccctcctgtttcttttcctgtttggtaaagttggattatctattacctatgttttgtgagtgtagttatctttgttgggttggagttttccccctaggactttctgtagtgctggatttgtggctatgtattgtttaaatatggttttgtcatggaatatcttgtgttctccatctatagtgattgaaagctttgctgggtacagtagtctgggttggcaaccatgttcccttagtgtttgtaggacatctatccaggaccttctggctttcaaagtttccattgagaagtcaagtgtgattctgataggtctgcctttacatgttacttgacctttttccttttctgctcttaatattttctctttattctgtaagtttggtgttttgattattatgtggtgaggggagtctttttgtggtccagtctatttggtgttctgtaagcttcttgtactttcataggcatatccttctgtaggttgaggaagttttcttctatgattctgttgaatatgttttctgtacctttgagctgtatttcttcaccttcttctatacctatcattcttagattcgaacttttcaaggtgttccatatttcctggatattttctgttagagacttgttggacttgagattttcttcagtccatgactgtatatcctctagtgagtcttcaacaactgagattctctcttccatctcttgtattctattggttatactcacatcattagatctggattgtttatccagcctttgtattttcaacatcccctctttctgtgttttctttattgtttctatttcagctttcatgccttgaactctttccagtgcttccttcacttgtttggttgtttttactttacattctttaagagaattacttatttcttaaatttgtttgctttttcttctatttctttaagagattgtcttgtttcttcttcaagggtctcaaacatcttcatgaagtagatttttaggtctttctcttcttcctctgtgttgtgcttttcagatcttgctagtgtggagtccctagattctggtggtatcatattggtctttctgttgagtgtgttcttattctgccttctgcccatttcttcttccggggtgcaggtggggtctctctatctcctcttaccacctggtggtgtgtgtgggtcaagacttcagtgtctgcagatatgaatggtcttgcctctcctggtagtctcctcactcaggagaggttgggccagcagagggggaaggaagagtgaggtatttccagcctcacagaggtccttcctgtctgggcgggtccactctatgcagacaggttcgctctctgcagccacagacccagagagatcctgggttgatggggaccttgggcaggagtagggctcaggataggtcagggcggccgagggggaaggaagagtgccccaatttgtttttgaccctagtacttatcacagcaacagaaatcagattaaagcccccctctttcatactttaagcatacaaaattaaagccagaatcaaacatgggatacttgctatttttccagtcttttcatatgtagtttggtggacaccttagcctggggacagttagatagtcataaagaaaatctgttttgcaggctctaagtcctgacaacgtccgagcatagagagactatgctcctctcagctttatgtgcaaaagccagcactctcacattttctctttctacttgtactccctagccagggtcccctctagaccatctggagggtgaaaatgctcccattgtgaactctgctctgctccagctcctaaagaacctccagccttgtacctctcacacatgcctcactgtggcatgattgtgagttgtcctctctcagtaggctatagatggtgtttctgtcccacctggtcccacagcctttctgtcccaaataaacatgcagaggcttatattaattgttaactgtttgtctgatggctcaggcttcttattggctagctctcacttaactcatttatattaatctgtgtatcttcttgtggttttggcttactggacaatgcttgatatcctaccatcctggtagctacatggcatctccctggcaactcctttcttttttcttcttcccagaattctcctagtctggtagccccacccatacttcctgcctggctactggtcaatcagcatttattcatcaaccaataagacaaacatatattcacagtatatacaatacatcacaatacacatctttgtgtggaggagctaagtgtttgtctcaagaactggctcagtaaatatttgctgagtgagtgacctgggccacatgttcttgcctccatttgccgttcactcctcatctcagcttgcattgccttctcccaacattgcagatgtcaacatgaccctgctgtatgttgaattatgcattcaagttggtctcagtcttcatggcctaagccctgtacatttcctaggcagacttctctaagtgctccacatctggtgaccacttcctcctgtggtagctgtcatcacttgtcccttgcctgattattattattttccggtatcaatggttattaaaaggtgacacagcactttttacagattagaaagtggggtcctctgtgggtagatgcaccttgcaccaggacacatggctttggtgtcacacattaactgtgtgctcttggacagtgaaccatttgcacaccagataaggaagtcttgatacaaagtcccctgcaccagaccacagcagggacagggacttcctctgacaaccctctgacaacttttatattttgttttgttttgtttgcagcccatttttttttattccaaccttttctccctcacatcctcctttgtacatggtaatcattgttgtcattgatagtcaatgttttctaggcagggtctctatgtagcccagtctggcctcaagcttacccagtgtgggagttacaggcacaccacacccagtttaatttgttgactattgctaattattaggtttctgattaggtgggataatttcgagaaatattacctgaaaaactgataaaatttttatcattatcatgctaatctttgtaacagctctattgagttttattcttttactataaagttcatcttctaaagtacacagatcagcagctttagtaacttgcagagtcatagaaccattgtacaatttttaaatattttcttcccctccccccaaaaagaaaccttaagcatttcttatctcatccctgagagatcctagcaattactaaacttcttggatctttgtgtatgtatttgtctatttgtctactctgagctttcatataaatggagctatacagtataggatagtgtaagactacaaaatacttctgggtattatgatacatgctgtgatctggttagtcaggatgctgagggaggaggctgaggcaggaggattgtcaggaattggaggtcagtctgggaaacatagtgagaacctgtttcaaccatacatacacacacacacacacacacacacacacacacacacacacacacacacacacacacacacacacacacacgtatacacacatgcatacacacacacatggttgacagtgattaaggaagacaaccaaacaataaacactggccttcatttgcacatgcaccagggtatgtgcaacccaatgcacaatgcgcgtctgcaggaacgtgtgtgcatacctacgcaaagtggatgacttgagcagccttgggtctaaattatccccaaggacacagtgaggaactggccctcgtcagtgttcagggtccagctcactgtagacactgggctttatgctcccagacctctacaggtagatgagtttgaggtcactgatttgagttattctggttcttggcattctctgctctgaaagaaaatataccaagtaactgaataatagtttcatctctgtgtccttggtgcctcacaaagagatagcgcaaatgtggggaatcagcttaagagtagaatgaatgagatcctaatcccacaggctcttaaatactgtggtcatttcactttgggactcttatggtgaacatgggcaattctagagacaacacaaattctctttgcaaattcaggaatatccatattaattctctgtctcttgatctctgaacagatgcctactaactagtgttacccacttcctattggatgaccaacatgccagtccataatttcatcagaaatgcttttagccaggtgctctaaggaattctcatacaaggttatggccatctgattattattttactgtaaccgatttgaagaactttgtaatgttacccttgtaccttgatcaacccactgaagagtggcagtcaatgttatctgccagaggcaaattagaaagtagggaaagtttcctagtgtccagaagacacatttccgttgagtctaaggcccaggtccctgagggcaaaaaccagggcacatgggtcaccctcccggcctctcctatcaaaatattgtgagttggcacaggtctgtaattcaagctacactggaggccacagcagggggaatgaaagttcaaggccttcttggactacagagtgagttcatggatagtctggataacttgttgaggttttgtctcaaaatagttttaaaagggatagcttggtggtaaagcacttgcctagattgcatgcggttctaggttcaaaccacagtgcctcccccaatcccatataacatctcacaaaaaacagtggaaagacaagaaacagttgcagcagcataaaacctggcaatgctctgtagccatctaccatatgtgagcctctgatatgggtgctgggaaccgaatgtggatcttctgtgggagtggtgtgcactaatctccactgagccatcgctccagcttccacagtttgaggattctttatattttattggcataagttattactcagacgtttcatttacagataaaataaatatttataaatatgttctcccagttgttcagaaggactttttaaagtaatttttaaaattttttgagattacaacatccttacatcatccccattccctttcctccctctgagctctcccatttacaccctcttcttcttcttcttcttcttcttcttcttcttcttcttcttcttattcttattcttattctttggtttttcaagacagagtttccctgtgtagcttttggagcttgtcctggaactagctcttgtgtgtgtgtgtgtgtgtgtgtgtgtgtgtgttcctaaatgcataactacaataccctcagtctgtataatgtcacttgtatatatgtttccagggatggctatttggtattaggtaccagttggtgtgttcttctctggagaagcatatttctcccactgtcagcattccttagttgcctgtagttctttgtttaggggctgagacctcattacctatcctcaatccatgttagcatatctattggtatcatacttattcagttcttggtttttgaatccatggtggtgagacctcttagaggtagcttctgacatcattaggagacaacagaaaactccgtattcctctggctctaacactctttctgcaccctcttccataatgatctctgggccttaggtaacagaagctgttttgtagatgtatcagttgggactgtgccgcacaactctacattttgatcagctgtagttctgtgatggtctccatctattgcaaagagaagtttctctgatgaggggtgacagatacacctgtctgtgggcataaggacaaatatttagaatgtagtttatgaattatgctggcttagtaaagtgtcagttgtaggttcttctccaggattcatgacttcaagagccttgagtaattgcctaggtttccagtaccaagtgtggttttcctcttgttgggtgggtcttaagttcaattatcgagctgttggttaccactgatgtatgcatgccagtattgcaccttcaatgttatcatgccacgctagccattgttgaggttttttgttcttccattatttaaaagtactaaaagtgctttaaatctactcctgtttcccttcatttttaacatagatagtggcatatttataaacactactttacttttttttgttgtttaatattgtagcacttgcttcacaccagagcactgggggcttccttatttcttagtggcatagtttattcaaccagtcccttactgacagagagtcttactttttctctttgctattacagatgatactgcaatgaaaaatcttgagtgcagcacattgctttgctgtcaagctaccaatgtttcatattttggtgctgtgcttttagggtaaatttctaaaagtgtgaatgctgggataaagagtataacattgtcagcaattagtaaatcccattcctgggttattttgcattcctatcagtggtgtatcacagaagctaatttcctgtaaggtggccaagaaaatatgctgtcaagcttttgcagtttgccctctggtagataagtggtatctcagtgttatacttcctaccttttactttgaatgaggccactcttaatggcctatgtttaagggcaatagaaatagaaatacaactatatggtgatgtgttcttattttcaaattggtgagatatatttgcattgaggtaaaggatgtggccagcatatttcatagagaaactcctataaagctttagttgaaagattgcatggaggaaaaatgtctctgtgttgatcacttctgtcattgttaccaaatacccaagcaaatcagtttgtagtagaaaacaatttactttagctagccatcattggagaggtggtagaagcatgtgaccagagactgttccttgcacaacagccagggacaagaagtaccctccataaacatgcatctgtgtcctgatgcactttctgacagcccactcagctgggaattcaccagaggattaatcacattggtgaggtcagtgcattcatgaaccaaacacctcccaagagtgccaccagctgaggaacaagcaagtcatcagcacgtactactttgggcagttttctatgcaagccatgatagtatccttcagagttccacaaaggtctttacagtttccttatagtggcaggcactcgctgacattttcatcttcagcagtgtctcacacacacacacacacacacacacacacagagagagagagagagagagagagagagaattggaaaagaagggaaggaagaaacaaagatgcagatctactgtagacatttggatctggtgactgcggagtgaggccttcatggttgtgtttttgagattgcatgtgtgtttgtgtgtatgtatggtatgtgtgtatgtgtgtttgcgtgtgtggtatgtgtgtttttgtatgtgagtgtatgcgtgtctctgtgtgtggcgtgtttatgtgttttgcgtgtatatatgcgtgtttctgtgtgtggtatgtttatgtggtgtgtgtgtgtgtgtgatactttgtggggagccacagccccaagatggtgcctggctggatgccagggagatggagcttagctgtaaacaagccttatttggaagcgcttagtggatctggtgtgcctcttccagctgtgacctatccgggatcgccaggtggcgtgagttaattgggtaatgagattgcttttaagggcttgccggggggactagtagggagtgaagctaggagaagctgaagtagaagctgagcggaagctgatgtacaaggttcctgaataaacttcttgaagaagagtcgtggtcgtgtctttcttgttggtcgagatagatgtgacgatactttacctttttaaagctgcagtgattctgtgcagacaaacctgaaaataaagttcatggctgacaaatactaattgggtcctgcaatgagctggctgatgggtgttggaaacatggtagtaactggactatagacagatggagcagagatattttgtaaattcactaggaaccatcagtcctgtgaaaggacttaggctgagttagagtgggaacaggaaggaatgtttcttggtaggctggctaagaaagttctcccagagatgactcttaagctgatttacagaataaaattgggctttgaggctggttaaaccttcacttttaagggtcatttgtaatgataaatctttccgccagctgcctgagttctgcccaccgctacattagggccccaagtaacacacagagacttacattagttacaatgctgctggccaatgactaggatttcttatatgcttgcttatgctttatcaaccatagccattaatctatatatttatgaagacttatcttatggaagatgctggtggcagcatgcatcctcttcccaggatcacatggaggctccacagagaagagaggaggaagaagagagtcatttcctgcttgtccctgcttttattctgagtctgcctgctatgtcacttcctgtctgggtcacaagacttctctttactacatttcccagaatcctccttgattcctagtcccacctttctttcttccctattggccaacagtgctttattcaacaaccaataagataaacatacacagaaggacatcccccatcagtcattggaaggtttgaacagaattactgtaaagcactgtgttccaggcctggttcacagtgaatggcagccgtgttgaggatgaggaagaagcccacgatttcctgctcagccagatctttgtttcaggcccacttcagactaaggaatttcatcagacctttcgtggtgagcccagcccatgctgactcatccatttacaaatgataagtggaccctcctgttttccagttcctggggatgctgtggtgtaaccggcctgccttcgtggatcacggttcaggaagtgatgcagtagaatgagctcatgttagtgcttcttctagagatttaaaaacaggattgtaggtaagcctttgtgaggaggggacttatccttctctgagtttcactccatagttgaaggcacagactgagactgtgggacttttaactgatttaacctgcagcatccatcatcaactgagaaactgaaacctagctgtgctattagccagcaactgtactcttccagtccgatgaaaatttctaagttggtgtcacacctcagttcccactgccatgacccatggttctctcaaatgtggcatggttttggtggtggggtgctaccaaccaattcgaagaaaacactttttaagataatatgttctttattcctggagaaacttctgaattctaacactaatagataacctttaccttctgctcccacaagtccctcttgtatacatgctgtttgaagtctgttgttttgttcaaaactcttatttacttcaattcagtaccccctagtctgaaaatacttatcataccaacttaagacatggttcacttattgttatttattattggacagtactgcagggtatcagttaagttttaatttcagataaataattatttggtatatctgctatatggtatttggggtacacatttgcttaaagattgtttcataaaaataaatttaaatggccatcttgtattttttatttgctaactcttagtctcaattgttatattctttacttatggtttttttttggtactcatagaaagctatagaaaatattcagaatatttttataaatatggaaacagaagcccagagaaggcaataataccaagaatatataattggtatgcagtagaatcagtattcagtgctgtccaaatacaaatcaactgtgtttatacttctgctgttcgcaaaacacagctcttcatcatgctgaaggtcagtaccagatgctattctttcctggtaatcaacacttgaccttcatagctcagcccatctgatgccttgtgaagcatccactgaccaccccaagaagagttctctaaacgataacataacagcacttgcacagtatactggtccctaggaggccatcggtgtcctgaaatagggacgtttcctaggttcccagtgcctaggatggaagagctcagtgaagggatgacccccacttcttggcatcagatgctaaagcctgtgtggagggtactgactgggagacagcggctctctgtctgtggagaataccatcagagagcaggtattagaaactagccttggtctcagaaaccatattccctatgttatttaattgggaacactgctaattacacttttgtgttgctatttttctgtgacctttgatacagttgtaacttgtgttattgcataattaccttgaatgaaacatctgagggtgaatcagcattagttcacattcataaatatcctgaaggcaaggaggaagaaatgaagaagcctgagcctgagctcagtgaacttcaggcaagtcatctgaaaaagccaatattctctccttctatcgtctgaaacctgatccctccagttcccatagaagagagtactgagaaagacaactggaatcaggggcatctttgggatgagctagaaacctagcacagtggaaactcccacgaatctatgagggtgaccatagctcagactcctagcaatgtggggcacagagcctgaaccagccatctcctggaaccaggcaaaactcccaggggagggactgggacccccaactcagccacataaactttggcttacaatttgctgtgcctaaaagattagctggggtaaagctgatgcagaaattatgggaatggccaaccaatgactggtccagcttgagatccataccacgagagggagcccactcctgacactgcctaaatggccaggacccagaggctggacagtccagaggccaaggataggaccaagcatggctgtcaaaaaaagtcaatgaagtgattcctaatgatattctgctatactcatagattgttgccgagcccaattttcatcagagaggtttcattcagcaactgatggaaacagatgcagagaaccacagtcaaacactaggtggacttcggcaaatcctgtggaagagggggagaaggactgtgggagccagaggggccaaagacaccacaagaaaaccatgtaaacaactaacctaggctcataagggctcacagagactgagctgcccatcagagagcatgcatgggactgacctaggccctctgcacatgtattacagttgtgtagcttttgggacccctaacagcgggagcagggcctgtctctgactcttacgtgcttttgggacccttttttccttctgtgttgcctcatccagtcttaataggagagcaggtgcctagtcttattgcaacttgatataccatggctggctgatatgagagacttacccttttctcaagaaaaaggaggaggagggatgggggtggggtgaggtggattggagagagggactgggaggagaggagggagagaggggaaaagtgattgttctggaacaaattaattagttaactaataaaaataaaagcaaaatgtacaataaagccaatttcacacaaattgcaaagtcatttcaattgctagagatatgtgtgcttgatctatagggatgttactctacttgactttattccagaattaaaaagatcatcttaaagttaattgcatatctgttatatgtagggcttctctgtcttttctcatttatgaacagacatacctaactggagaattcaaaagagatacagaactcctctcccttggctgacctgctcatcacttgactgaggccaattttggggtggtaaaacatcagttcactaaggaaaggaacactctattctctctggttgtccttggacttatgttgtttggctttcttgctgaaaccttccagttaaaaacaattgttgagccaatgtcctttccaaaatgacacatccatgccacaagaggtggatatttatgcttatttaggaatgactgacaagcttgacagatttagatgatttctatggattcaaacaagggttaaaccctttccttagttggaagtacagaatgcaaacaatccactcagcaacatgcctgatacagtctgtcacatcaaggaaatgacagttggagtttgctatgtcacttgatggaccaggtaaagcctggggttaaaaagaagtctaacagtagaaccctaaacatcaaacctgcagtgtggttctgctttttggggcagaggaacttccttctatcctagaagtgaccaggctggccgcagtatgcacacaagtaccggctggagggacaatcaaggtttgggaacaccggatccagtcagatggctctggtctgtgtcctacccctgacccttcttgattttggacaaggcacctctccatcagtcccattttcttcacttataagtggaggtgaccagagtgtctgcctcaaagattacagtcttaatgggattgcaggtgaagggctcagcctagggcccagcacacaggaagcacagtgtgctgacgcctcgtgctattcttcttcacttctcagtactacacagacaaatgaacagtaagttaatatgcacacggactcagtgttagcttctgaccacagcttctccatagacagattccctgggataattcaaggcctattaaagcaacagggatttatagacagaggggtggatggcaggaactcgggacttcaaacactgtcttcctcttctggttgtttttggaccccttctaacttaatactcccaagggaaacagcaacagcacagaggctaggccaatgcctgatgggagactctggccacagcctctttacagacctgaggagctgcactggccttgtagaagactcttttcatataactaaatgcaagcgtggagcttgaccaatgcagcttcattagctttaacctttcaaagctgttgtagaatattattttaaggtgtgttacatttgtttatgctgtggaacatttgtttaatgatgtgaagatatgttgcattcttttatgttgcatttgtttaactctgtgaagctattttactttgcctgtttaagacacctgattggtctaataaagagcaaggcaggaaaaaggatagccagggcggcaggcagagagaataaataggagaaatcaggaaaaagagattgaggagcaaaaaaaggaaggacagaagaggccagccacccagctacatagcaagccacagagtaagaagtaaagaaaggtatatagaaatagggaaagtagcccagaggcaaaagatagatgggataatttaagaaaagctggctagaaacaaaccaagctaaggccagataagaattaagtctccatgtgtgattatttgggatatgagtggtgcccccccccaaagagccaaaagagaaaagggtaaaaaacaacacaaagccttacccgtttgtttggatctgaaaattttaaaaggaaaaaaaaaaaggagaacaaaggtggttaggggactagggagcactatgaagttagtgaagaaccaacttattcaggcgatgtgttcctcatttggtactcagctggtccaggcattctctggaggtgtatgcaagcaagccttgggattgctagcccgggtaaagagagagaaaagacagagccaagaacaacgccttgtttaggtgcagacatttaactcattcaatccattcaacacatttccttcagcctctgtgatgtaacgggctcttgctcacacagaaagcctactcagttcactagatttattcccaggattcctacctgtgactgtgagccctgagattcctgtctgtggaggtgagcccctcaaagcagtcagtccctacctcccctggagcttacatcctctccttgtcagttcctggctttgaacctggccctatttccttcagagggaggtggaaacagaagtgtgtgtgtgtgtgtgtgtgtgtgtgtgtgtgtgtgtgtgtgtgtgtgtgtgtgtgtctgtgtgtgtgtgtgtgtgtgtctgtgtgtgtgtgtgtgtgtctgtgtgtgtgtgtgtgtgtgtctgtgtgtgtgtgtgtgtgtgtgtgtgtgtgtgtgtgtctgtgtgtgcgcacgttgtgtgcagatagctagcagaagggaggtgtcctttgtccttttccccattcctcagagctgagtcagagcagtgattctattgacccaagccactatccctcagctgagtctttataaagccctattttcctgttgtttggcagaagatgaagggatgggaggtggggggagatgaggagaggggtggggattagcagctgataccaactagggaaaataaaaccaactagtttgcacaaaacacttgggagtcaggtagccagccacctgtgctcctctgctgtgggaaatgtttggccgccctcatgagaagcaggaatgcttacagcacagaattatccagattgataacaatccactccgtgcccatagccaggcggtggcctggccacagacagacggagcccaccagacatccctttacttaccaacccagattaccagttgtaccagcataggtgccagttgagggccaacttgctagagggctttttggtcgtgcaagagcccaaaccttgagctgttcctttaaattcctactcaaccacccctgtcaagctttaaaacttaaatcggattattacagcaggtgtgctgttatttggagtttgaaattgcaccaattcaatcaatcatgatcttttgtgttcaagcacaaaggactagaattcaaggagaaaaaaaaaaaatccagatctcatgattcaagggttttgtctgtgtttgttcttctctctttggaacttccttcgttttctagaagagaatgagaagatgagatgcaaacatgagggagacagggagactggctcctcaagtcacacccctcgtttgctgcaggggacacaggggacccataccctccctattgctcatggctagtgttctaagcaactccgtgcactgactcttagcatgtcattgcagaagtctgagttctttaattagctgggggaaaaaaaaccaacacaactcatcactcccctaaaagcttcctgttttgtggattttatttattcagctggtttaattattaagaaaaagcaacaggtttcttttcttttcttttcttttttcttttttctttttttaactagctaagctcttcttacttgatcatgtggtcattgtttttatgctacaagaaccaccccatggcagtcacctcttctgggtatagggcaggcacaggtttatctgattattgctccctgaggtcaataccaccacgacaaacacttctttctcaatttctaccctttgctctttgtgtaagatgcaactcccatatcagaggggttggactctcagaatcttatctggttttatgtatggaatttcagagtacgtacgacatatgagccagctctgcctccagtgaagattagagaaatctccctagctatcgacaaagggtgtgtatgccatgccaaggattagctgtcttgattctctgataagtatgacagaaacaacttttgagccagaaagtagaggttcaaagtctcctgtagtgacatcttgcttgtacaaataaagcctgtctggagatcagaggaggagcttgccactatcgaaccatagagttctggaggtctgtacagacaaacaggaagtaagatggctgggtggagagaggatataagctggaagaaataggaacacactctcttctctgatgggaagcacatgaggtaaaggtggttttgccttgctccttttctctgatctctcagcattttccactatatctgactctaggtttgtattatttagaccaattaagagcttcatttatggtttcctaagccccaaattagccaagtgaacatggatacagtcataggttatagggtaaatgtatatttagaattaaaaggctttaagaaacttttttcagatgaatgaatttgggttcatagaaattcaataatgtttcctctcattcagaaggacacaaaactttaaatgcataattggccttttggttaagatgatgcaaagtaagccagacaggcaggcacacacctgtaatgcagctctagggaagatggggggtggtccctagagctaggcgttggagaccagcctgaacaacataatcaatatcccatcttagaaagaaatgttaaacataaataaggactgaggtgatagctcagcaggataaatgctcgttaaatagtagtaaggcaattacccagagagcaccagagggaggcaaagggttaaaaagtagagaaaagcagcaaagaaccttggaggactgatttgggatggggagatgactcagtatacaaagtgtttcccacacaagtgtgaggatgggagtctagagtcccagaacccataaatgccgggcggctgtggaggtccatctgtaattcctgtgtttcaagactggaaatcctcagagtgagctggctattcacattagcaatactgatgagctctgggttcatttgagagaccctgcctcagtgaccaagacagagagagatggaaggagattccctgtgtcagccttgggcctccaaatgtaagagcacacataccccaacatatatacctatgaggggaaaaaaaagggcagcatactgaaaggatccaacatatacctaagagtcacacaaaagggaaatgtaagagatggctgaaaaatgtttcaagaaagtcaaactgagaagtttccagaattggaactttcgagcctacccttccaccctaggttaaagacaaatccgtaatccagagtctcaaggacaaagagtggagtctgaaagttcgaaaagggacaaatcaatcaatgcaaggaatggcaaatgatcaaaatgaaaccaaagagccaggcacatcacaaaagacgttatataatgacagctggagaaggacatcggtttcattattcatcaaagaaatgcaaattcaaccctctttgagagacctcagcacatttggttgaaaggagggaatataaaatgtgggggagtggaggaagtcctgagtgaatgtgggttgttgttgacataggcacagccatgtcaaggaccctagagccttagacccatgggaaaatgacaaagctttcccttctctctctcactaggtgtgtgtgtgtgtgtgtgtgtgtgtgtgtgtgtgtgtgtgtgtgtgtgtgtgtgtgtgttgtgtgtgtagatagcgtgtgcagaaaatgtccaccctagctttctctccctggataattacagcctgaaccttgctctcctacagagactgctcctttcaagattagctaaacctgcccccttgctcagctctatgcacaaacctgtttgtaatcaccctgcccccttgctcagctgtaggcaataaccctacctctctgttcaactctatataattgggtgctgcagtttctccatcagagagtccagtccacctgaacccagctttcagtctgtccatatgtctgtcttgtcttcaatttctcaccacccccagtcccgtccatccttggagccacgctgaacctggcaaccaaatgctggtaaatggcagtcgggcaacacacattattgatggcagtgcaccctagcacactgtttttggcaaaactggttagcaatatagagcttccctttcctttcttccttacccaaaatgctgagtcctgacaatttcagattctagattaccccccccccagatttcagaatacttgcatatccttaatgaagtttcatggggaatccaagcctaaatacaaaacttactgtttcatgtccacataagctgaaggtaattttgtataattttggggtgcctgtgctcttactgtgacccatcacatgaagtctgaagtgagatttctatttgctatggtcttttggcactcaaagatttttggagcatgctggattttgagttcctgaatagcaacaatgaacatatgttttctctacagcctcaaaactccacaccgaatagaactatatgcatagaaaacacacacaaaagttccacaaaagaacaacactattctgatagccaaaacctttaaaccaccctaatgtccatcgagataataaatggtgtttgtataatgaatatgagaattaatgaagaactcatgaagcaacacaaatccatgaagataatgtcgattaaaagaaatcacaatcttggagaaaacattttaaaagtatatgataaagaatttagagcctgaatacataaagagcacttgtgttttaatcctaatgaacaatctactttaaagggggcacagaatgaggttagatgtggggatgcatgcttgtaatcccagcactgaagagactggggcaagaggatccaagtccaatgctagcctggactacatgagaccctgtatcaaaaagaagggggcggggtgtcaaaatatttgaacaggatctttatcaaaaagagtggactttggaggctttttttggcccatttgcacagcacaggctttcttgtgcttgtctttgtgcaaagtcaggcatcacagcagcatcttggttctccaccaaggatgcaaattttatcattttaatgcattattataattggttgccttcagacagtctggagtggttctctgcttgtgcctatgtctgccgcctgatttagtcagggctagctgcggccttctctagctgtttgcttttgccttctgccctgttcacctgccttagaagtttccttacttgacataaagtcccatgtgggggtcacatattaggtggtagacttattgctgggaaaatgagtttttccattcaagtcctctaattgggaaacaattttagcagtgtctgtaacaggtctactcgtgttaaacagtggagtgatggtgtcatgtttactgtaacacacgaagctactgcaacgggcagaggggcatactccataatgcagggatggggtagggtggggtggaggtccttgacaatgggtcgaatatgcagcagatggcaagctggtgacaaggccctggattttctgtcctccctaaaattctgcatcctggctgtctggtaaagcatctgccagctgccacccctgtgctcaaccaaccggctttctagaatcagcaggtgaaggagtgaggctgtgaggtagcttgcgtaaatgacagctgtgtccctgaacgaggagcaagatgtagatcaaatatggacattttccttctctgagagttcccctgaggacatataaaaccagggataagacctaattaactaatgtacagtgcgcacataaaatatatgagctcccgtcatattttatctctacttaacctcataacacattcatagttactgccctaacaggtttgttgtaaaaccaataaaagggaaaacaagcctgtgctgtaacttagctgtgtctggaattaaatcaaggtatggattgcaccttgctttaaaagctccaacaatgtgtgagttgtgccttgcttgctctgaaaaactagagacaattctatgatatggtttaatataagaatcaataggcctggaccagcaaggtggctcagagggtaaaggcacttgctgccaagcccaacaatgagttccaacccacatggtggaaggagagaagcaattcctacaagctgttctctgacttccgcttgtgcatagtgactctcactccccacccccaaaacataagtaagtgtagttaagagaaaagaaccaaggagcctgtcccaccccttgactaactgaaaaagccttctagactaggtggcatagtcagctggcttgggagacagaagaaactgaagagattgtacatgaggctccagttgtggttgtggaatattcctttacactgtgtgacaatgtgtcactgtgatcgctttaataaagagttgaatggccattagctaggcaggaagaggttaggcgggacttctgggacagagaattctgggaagaagatagattttgccaggcggatgaagaggaagcaggatgggcagtgcagagtaaaggtaatggagccacgtgaaagaatgtagatgaaaagatatgggctaatttacattgttggaactagttaggaacaagcctaagctaaggccgagcttttataatatggtaagtctctcccccctctctctccctccctccctgtgagctggcagcccaaaggaaaattcatttacagatcatactttgcttttatctttcatttcctccatcttcttggtcttaacaattacagccagtggttccaggggcaaaggtcagtggcatctagaaaacacacttattgcagtgatgaatcaagcaaatagagtaattcacaattagtctgtattagtctgtagtattccagaaacggctggcatactacaaagccccaaataaacttgtcctaattccacgtctatccctgagggaagtgtagcaaatttagacggtgcatagtgttaggaaaaaaaaaaaaaaactcactaattttcaccattttctcactggccaaacgggtctcctagtactaagctcagtatgagaataaaagtaggaaaatttatctttatctgttccaatgcttgttgggtgttggaacgtctacccagtgctattcttcactacacagaatttatttaataacctaacaccacatctatcactgggtaggagaattacagcgtttatcattacactacatgagatgattcccttgtgactgacttttgcacatgtgtttgagcaaataccagtgaacagaggtatccatctagaaaagtgcttatgaaatacatagtaatacagaggtttcagttggtggaaaggggtttctgaagtctcgtgtagggctgctagccatgcttttagcattttctttcttcttttcttttcttttcttttcttttttctctcctctcctttcctctcccctccccccccctccccttctctcttctcctctcctttcctttttctttcttaaatagtaaggttgctgcagaatgctaccctgtaagcataacatcgaggttagtatctgaatcatcagctttgaataatggcaagaatgcgcctgttctcattcgttcataggaggcagggggaggagcaccaaagacttagtccagccatgccctgcctcctgagcgtcagtaccccccatgtaactgtgcccagctgcacatgggatggtttcagggagtgctacaatgggcaggaggtagttaaccaaagggggctctgtctttacagcttttgagaggttgtcacccatgcttggttgggacttctggcgacacaggtgtttcagggttgtccgtgttccattaagtaagcctgataacctcaaaggttcacaaagccagattcagtgaaatcattcctttggtccattgttgatacccaggaaacgatccctccacagagattttggttgaaatctctagctggtgaatgaggaaaaccgggttggggaagcatgcacgtcctcagaactgctcttctctggtcgggatctaaagcttatgttacaatgttcattttggtaaaacaggatgagtgcagtgctcattatttttatggattctcaagagcgttgcaggaataaccatgagtgaaaacacaatgtgccagctgtactctcagtgacagcaaagtgacaactaaccccgctttatgaaaggcattttgagatcaatggcttctatgtgaggtttttgataatttagattttaatacaattagttcgcatatttaagtgacaaaatataaagcaccactttaaaataatttcctaatgcttccatttatctgctctaatttacaaatgcaattacttcccagttgtatttaattgtcatttacgatgaacaccagattgcatggtttcacctcaaaatgttaaatatactctcgattaatagtagccacaggagactcttcttgaagaactcaggtctaacaagacagaaaagtgcctggaaagacactcagtggtatgttaacactcaccagtatgttaacagccagggacattctgtaagaaaagaatcctgaggtgactctgaagccagcatccttttgcagcatcaatgacaacttctctgccttagttacttttctgtaagacaccatgactgaggcagcttataaaagaaagcattgaatgcttacatgcttagtcccaaagcgttagtctatgaccatcacagcagggaacatggcggcaggcaggcatggttctagctagacctgtagctgaaagcttccatcctatccaaagttggcggcatagagacagactaggcttggtgtgggcttttgaaacctcagagcctacccccagtgacacacttcctccaactaagaaccaaacattcaattatgtgagcctatgggaccattttcatttaaaccacacctcctttgcaggatttgtgttctgaaagaataggtagatgaatctgtatcatgtctgtgttgggcagggtcctctctagaactgagagaatatgtgaatgtgtggcagtacactagaatggcttatagcctggtaatggcttataggcaggaccaggtaatccccacagtggctagaggggagaacctgtttctctcaggctacaaagcccaatgcatcaggaattccaatatagtgctgagggactcaatgagtcctgggaagctgcattcatgtatacttgggaaggtcagaggacaactcgtgggagtctgttatctccttccaggtgaacccagaggatcaaactaaagttgtcaggcaggcatctttatccactgagccatcttgctggctcctctagttatattttacaaaataagaaaaggagggtttactttcaaaagaaagcagtaaaaatcttttaactgtgtccccaaattagtgcatagtctcatttttaactgtgcctaaattagttcataatcttactattaactaaattagtacatagttccactgaccaaaaaatttatcggattaagcattaactagaaagcatattgacgggtaccaaaatggtatcactttagctttaaggcctacaatgattttttcttttactagtggaaatgtggctgcaaatgtcctcatgtacatcacaggtgatggtttgtccagatacattttgtagcctcactgtggatttgttttcagagggttcctttcctcaaaagtgaactatagagttatgcatcagattatgctaaattgagatttaactgatatgctttgaaaagattaaccatacacttccacaaaacgaacaaacaaacaaacaaatcctccttgaaagtgaatacaaattaggaaagaggcattaaaatagcccattcactagaagaaacaaagtttgtctcgccaagccaaacacctgaaattccaaccccttactagcaataactgaatgaagaaatgacttggtagtaaatctcaagaactctatttattgtagcaaacactttggcatttgagagaactcagattttctttgaaacaggtttaaatttatacaatgaaatcagacagaatagtctttatttaaaaaaagaaaaatccaaaccaccaaaagatactttatgtaataacaaaacataaaaaggaaagtcatgatggaatgaaaaagacaactaggcaataaacgtagaaatactggcatctgtctgcctagtgtgccttgtgtcatcactgcacacctgacacaggcctgatggaattcagatgaccctgcaagacctacttggaatttaaaaatttcatcagtaatttccttcaacttccaatttaaagatttttataattaatattagcaaaatatttcacactttcagtcttgcttcagcctggttcttaacatcatgtcaaactcccttctacatggaactatattagactttcttttgaagtcaggctcccactttaccacaatcatgattaagtgatgtcatttgtgctagcagtgtcctacgtgaaggagaaggaaggacgtcaacatggtcactgaagtccctgtcttattcaatcaattacagatcatccagcggacactgtgctttggtatccaacatttctcaagtgtcaatttctaataatgttccatcccagtgagtttcttaggttaagttagggcaatttcagctctgtaaacacttgcttggccagctgtttccttgaattggattggtttttgccccgaagaaagctgctccagggaaagtcacgtcttacccgtatgtccagatcctaaaactattattttctgcaaaaagacagaaggaccaagcaatctatggttatttctctatgtagccttggctggcctgaaactcactatgtaaatcaggctagctttgaactcacagagatcctcttgcctgtctccagagtgcatacaccacaacacccaagccttgaaagctttctcagtcaagaagttgcctacccattgcaaacacagttgccctcaggaaagcatggctgaactgagcctgtcctcagctcctcacagctcatcggatgtgatgttcactttgggtaggttacattctttgctggtttgacagctctgaagaatgtccttgtagtggttcttcagatcctcgtacaaggcaacggtttcttgtgagtgagccaagggtaacactttttcattcagcagcatctgtacttggaattcttcttgaggggtctttgcgttttcacaatggtaaagcacaaatatcaggttcgaggcataaggtacgatgtgaccacttcggaactttcgatgggcttgctccttaaaattatatgctgtcaggggctccttatctttgaaatagcccatgagcgagagcagcggcaggagggtctctgcatgaccaaactggaggatgactggagaagaaatcggctgagacctaaaatgagaaattgaagggaaaacttatatattcatgtcataaaacataatgtttacacttagtggcacctaattttctcattttaaaatgtaaccccagctctaattttttttttttattactattacatttagtgtataagttaggggaggctcacttatgctgtgaaatattcctttacacagtatgaatatatgtgtttctgtgattggtttaataaacaagctgactggtcaatagctgaacagaaagaataatggtaggcaggagagccagactaggagaatcctgggaagaagaagggcggagtctggagttgccagccagacgaagagggagcaggaggtgaacatgccatgctaataaaggtactgccatgtggcagagcataaataaggaatatgggttaacttaaaatgtaagagctagttagtaataagcctgaactattggctgagtatttataataatttaagtctctgtgtttatttgagagcagctgtgggacaggaaaactcctatatactaatgccacagcacagaggtcagaggacaaatgttaggagttgatcctctccttccaccagatgggtccagtaaactgaacttgatggtcaggcttaacaggcaggcacctttacccactgagccatcttgatgactcctatttaaaaagttctttatatattaactcaagcatatagctgaaattctgtgggagaactacactatttttacagtaaatgttaagttctaggaattaggatatccagcgtgctgcagaaatctaaagaagaatatgaccattctgttgagaagaccctggagtgttcactttagcactgaactgcctgcctttctgtgcggtactgcgtgagctagttcctgggaagactgacccatggagcactccctaatgaatgaccacatttaaagtgttgtcttttatcttttctcaacaggtatttttttcgtgtgtgtgtgtgtgtgtgtgtgtgtgtgtgtgtgtgtgtgtttgtgtgtgcatacacgtgtacatttttgcactgtgtagagaccagaagaaggtactgtgtgctagcctctatcattttcctttgagactggaggttttcccccaaagtctgcctttttttttttcttttcttttttttttttttggtgaggccagaacccagcagaccccagtaattctcctgttcctgtccccctagagtgaactaacaggcatttgtgaggataagtacaataacactcatgtatatacatgctgggcagagagaccaaaagggatgaacataaattatgagttcaaagccttgttaaacacatccaaactatagaagaaattaatctacgttgtgatccatttgaactacagtttaaacctaagaacacatgggttctatcactgagcttgctataatcccagcccctgacccaaattttaaatctgaagattctttatgcttaaattaaaaaaaaattagtctaatttttttttgtctcccttgctatcaacaatactgtaaaatcatcaagttttcagaaggaagttaaggaaaatggtactttaaaacatttattgtggagcttgagaggtgcaattcagagcacatactactcctgcagagggccctagtttggttcagctgtttagagcactggctgttcttccagaggatctgggttctattcccagcacccacatgatggctggcaaccatctataaccccagttccagtggccccagtgccctcttttggcctctatgggcactgcatacgtgcagtcatgcagtgtacatccatccatccaagcaaaacctacacataaaataaatcatttaaatttaagacagtttataacaggaaggaaaagtttcatttttataaatgtcaccatattaccgtctaatacagaccattctgttgctgtagtttttcttgtcctgctagttcccaccactgtttcagccccaaataaacacatggacactatattaattataaaactgttggctgatggctagggctttttattggctagctctgtcttaagtattaacccataactactaatctgtgtatttctacatggccttatcttaccagagaatacctggcgcatcctatcccctggtcctccgtggcatcccttcttggtacctctctgcctatctttcccagaattctcctcatctcccagtcccacctatcttcctgcctctattggccaaacagtgttttattcatcaaccaataagggaaacagatatacagaaggacatcccccatcaccattctactataaaagtttgcaatacataaaaaacagaatgttaaattcctggctaatatgccaataacaaaacaaagatagttacaattatagctaaagataaagatatttccaattccccaaaaacagtctacaaaatgagaatcattgaaagcagtcagaacatgattttactaattccaaatgtacctgtaggaaataacaactattcaatagtttatatcttctacagtaaccaagtgaagatattttaagtttataaaataatgagcatgatttcatgtgtgatgttttttcagcctttactgtggctcaaagcatccagcctgaagcagatgttcttgcaactaagaaaaagggaacaaggtgatgctgctcatatcaaaataaagggtcccgaataaaatggccacattctattttgcaagatgtaatgaggaacagccttttcaaagatccattaggctaatctgctaggtgtagcagaagcatcaccccatgccaagtgctgggcactacgccattgctcacatgggttggggagaggaggaaggcaggtaagacaacaacaaggaaatgtattttgtctcacatggacagtagcatctaactgttggggagttcttccatctgaggaggaacttgctaagaggcagtgtatggagaaccccacgtacatcctgcttcctgccctgataactggacaaagtgcagcagctggcttgcacttcgaatgcaggaacacacctgtattcactgtatacaggaacacactggaattcactatatagaccagaacagccttaaactcacagagattcacctgtccctgcctcccaagtgctaggattagagaaaggcatgctctactacataggctgtaaagtattttaaaagattgttttccttcaggtaggatatacctgaacattaaaaataaactgtggcttggtatcctggctctggatgcaagttcatgctattttttaagccttcacaaacttgagcacctgctaaactgggcaagtagaaggtagggcctccacatctgaaaaccgagggcacagtaacatattcagcaagttacacctagtgaagataagccacttcctttgcagagttgctggactaaactatagcaataaaacagcaggcagcacagaacagcaaatcaatgtgtgacagcaaacattaccaagagctgaggagctgcagcagcaggggtcataggtcacacacattactggtgtaagggtttagactccaagaggccggttcacatggtgctccttctaaaacactaccctgaagacactgtgtcaaatgctacgctcacctgactgagtgacattttaaaactcaccagataccccaaagcaccaaccctaaagtagaatttcaggtaccccatgactcaagtttcatcaaagccaaaactgaaaaaaaatgacatggaagaaaaatcttaacttcctctcatataagaaaatacttgtatgaagagtagaagaagtcatctaggaaaacaggcacttgtttactatcaaatcactgctaatttaaaataatttcaaacccgtttctatccgggaataaaacagtgtcccaccagctagctgaggaagactgtggtgtgtcaatgtttggtccccaggctcttaggctagaaatcgggatccgccaatttctaaggcatgcccatgtctaatcatggggagtaagacaatggcttaagttcttaacttggcagaaattcttccaaggatatataaaatgcaaggaccatctaagacttttggtcagaagtggcatacagtaagaaaacagattaaaagtgttaagactttcttgtttctccttgtggtgctagtggttaaatctggggctttgtatgggcgaggcaagcattctaccattaccccattcttccagacctttcctcgctttgactttagagaccaggtctcaccacatagctcaatatctctaggaattcaccatgtagcttaggctggtatctaattttttgatcattttacctcaactttcctagtgctgggattataggcaggcactgccatgtatgaccaatacacacacacacacacacacacacacacacacacacacacacacacacacaccttattcttgatgtttttcattttaaatacagcatgaaaagagtttaatagatggctagcttgaggctttaagggaaaaaaggtgatagcctactttcgattaaggtataacctggagagcaaggctccttatatagcctagccaggtctctaacacgtgatccttctgactgagccatttgagtgttggggtggctgggagtttgcaccatgacagactgggccacagactctcaatagcacttccagaataacagctcagaacataaactgcttaagtctcagacaaacatttttcttcactattttgtttcatgtagcccaaatcaacttcaatactattggggatttaagtaaaatacatagagataagaaagcaatggctacccttcaaggctctccaagagcacagccttcttcctcaaggctcctatgaaagcacaagaaaagcatttacatcagttttgggatataaaactcaaatcaacttaagacgataattttttagtcattttaaaatcataaagctcaaatcaagagtttatttacaactaagaataccagaatgcttttcttcacttataaacaggaggatgtggcagtatataaaccgatttctactttgtcatttaaagctcaattggtaaacatatcagacttagatacacatagacttccacggaaatatctaagtcataaagggaagagttaatatagtcctagtccttaaacggctgcccatgcttacatttccctgccctttataaggcttacttaaatgtttgtttttggagagatttaagtaatataagcattcattggggaaaaaataccgtgtttctcttctaaattacacctgaacagcaaatggtgtgtgtgtgtgtgtagaatcctcaactatgggaggctgaatgagttgtggggtttttgcacacgtgtgtgtatatatacaaaagattcttttgtgtacacaatttgttcattttcacatcccattcccctcctgctccttctgaactccttcttcccagcaatttctcttatgttttcgtttgctttgttttcatgacccactgagttgcactaaggttgctggcataggcatgggtgagtggagcaagagcaactctgcagtggccatgctgctaaagaaaatgcctccccttccccaccagtctttggctgccaacagcttccagggagagatggggcctcgtgaacgcctcccaacaaagggtttttgatggcctctgttacaatgaccatgccaaacacctcaagccaaatatcgaagggtatacaatctgatttttatcagaagccattaaagtatgcacacagtttttataaagtagctaacatttttaaaggaaatatttcttttgactcatatttcagagggtttagtcatctccgcaggccggatgaggcacctgggcagaacaccgtggtagccgtacctggctgagtagaactgttgacttcacagccaatcaggaagcagagtgaaagggtagtcagtaactccaataaggaagcaattaaggttcatttctaggaacatgttgccattgctccaagcactaaaactaaacgtaagccttagggaactcaatctagttctaaggcatctcctgggaaatggtttgctccaattcatacagcccaggcactccacgaaaacaccaaacgccccgttcctgcctcaactgtatcccaaggatagcacaagaatgtgtctggatttcatttgacctctgagttagagctccagagctagtctgtgacggagcccaaatactggcaatgcaaataggagttaactgtgcctctatctgaatggggaaaatggggaaagagtgctctctctctctctctctctctctctctctctctctctctctctctctcacacacacacacacacacacacacacacacacacacacacagaggaagaggcttgttgtgaagaaggctgaattaggaaggggaagggacggggtggggtaacagaatgaattgaagatagatcatgtacatgtatggaatttaattaaggttctgagtgaccatgggtgtgggattgtgggattagctatgtgggcataagcaacttccaatgcttacaccaccgaagaagaatgatcccccccccaccccccccccccccccccccgccagcagacaatagctccttggtacaggtggaatcccatgctctcttcaccagtcgggctacactggctggccagtgaaccataggaatctacctgtctctgcctcccagtgttgggttacggaagtgtgctgccatgtcctgctttttacatgggtgctggggttcaaatacattactttatgtttgcacagcaaacaccttacctgctgagctgattcccttgctcctaagcaaatctagtccccatcaaatctcggaaataagaagtccagtgtggtggtcactggattggttaccttctgttacccagggagagtatggttctgaaattacaccctcatcttatataagccagtgaggagactttaaatcttcaaccaaaactaaaatttaatctgaagtctaaaattacatcaagaaatgcaactatgtgtatgttcaaaatggataaaatgcctgaagtaatttgatatgctcagtaagaaaaactagtaattgtatgttttcccccaaatgtactcagctagatcttctaagctcttaatgtatgcttcacacgcaactggtgttacacaaagtctgtttgcaaatgcgatctaggaatatcatatggtgcgttgggcgaatctcaccacttgcacacttatgtaagagtacaaacaagtggccagaactgccagagctttaagaaactttgagaagaaaatcagccaaaatcaactttgcttacagtaagtctctggagaagtataggcctagaactaaaatgacacaaacatgttttttcttaagcaaaaccatgaagaaattaagctcacaagatagaagaacagggataaagctactattatcccccctactaggaagccggaagaatgatatgaaactgcagtttttagacagacaacagagtgagagaggaatcaggcaaatgaactgaccccaccaactgcccggctgactgtctagcgcttataggttgtggtgagggcagaggggacacatggcagggaaggctgtggtggagagcagagggacataggtaaatgaacaactaaatgtaacttagaaaacccataaggcaatgagtagatatagaaagtgagggagatgggagtccacagcgatgtggtggtcttatggcttagatgtctgggaggctggtgtggcgctaccgtaagaagtacgggagaaacagcggtcatatctacaccgcattctacatcacaaacacagcaccagctatccaaggcattgagttaagttactgaagagcagtatagtgaaaatgtctcagacccacacagaatagcaataaaactttgtttgtctatcaaacaaaacaaaacaaaacagttagacatatgaatctgaacttaaggagtagccatactatttacgtgaactccccttatttagcccatcatctttcaatatctagcaccgaagaaagatcatggccccagtgttacacccagggtcccgaccttacaaaatgacctagaatgtgaacacattcctaagaacttaaagagaccatgtccccctgttttaatgagtaacctgataaaaagcagtacaaagttattgtgcccctctacaagggtgtcatggcacagtggtttcaatggtaccatctagtgttaaaagaattatacaacctaaaaaagtaaccctattagttacaaaatctcaaatacccaaggcataagagaccatcatgacaaccaaatagataatttgcatggatttgctcagtcacatagatgtttaatgtcagaaattgccttgttctccagaaagggtataatattttatatttctatcagctatgaatgaggttgatcctcttattttccccagattatttctaatggctatgtaaaggttaatattcagtgttatccaaagaataatggcaaattaaaaaaaaatcagtacccatgcgaatttatacccacagttaactaaatacttaggagggacatagatgtgctgggattccagggacacacctggtgcacaccagcatactaggaacacaccagcacaccaggagtataccaggagcataccagcacaccaggagtataccaggagcataccagcacaccaggagcataccagcacaccaggagtataccaggagtacaccaggagcataccagcacaccaggagtataccaggagtataccaggagcataccagcacaccaggagcataccatcactctaggagtctaccaggtacacaccagcataccaggagtacaccagtacatcaggaatataccaggagcacaccagcagaacacctgcacaccaggtacacagcacactaggagtctaccaggtacacaccagcacaccaggatcacaccagtacaccaggctttttgtaggttctgacagaaatatggcaaatccttttgctcttttttgaaattattttcatttctatagacctttaaatccctgtataaatttagaactaacctctcaaattttcaaagaaacctgtcagattttgataagaattccactcaaccatagccagatgtggtagtgcactcctttaatcacagcacttgggaggcagggactgtgatttcaagactagcttggtctatacagtgagttccagacagccagagctacgtaatagagaaaccttgtctcaaaagaaagaaagtaaaacaaaacaaacaaaaacaaagtcaaagaattctactcaaccaataactgggtcttacaattcataaataggctacatcttacatttctgggattatttggaatttctctctttgtactgtcttgaattttcagtatacactactgatagaattttattactttagctttgagcaaaaactaaattatactagcaagccttacaaagttatttaagagactgctgacgcaattataaatctactgatccaatgaacaatgaccaaccaggaaaggtctgttatctcataaagcgtaaggttggaagccgttcagaaagtcaaacagaaaaacattaactcttattgtcagtattatctttatttgaaatccccacagaagcttctggttggaccagcgaggtggctcagttggtaaaagaaccaagccggatgacccaaggttcatacgtggaccccatatggtggaagagataatcaactcctaggagtcatctcttgacacctacacattaaataaacgaacaaacacatgccattttttaaagtgtttctagtagttaatctagttgtgggttttatcaggtttttttccctacctcctgtcaaacccaagaacattttacaaattagtgctgggtccataaataatagacattggtatgaacaaaactactttaacttctatgaaacagaccatctccagtttctgtggccccattttggtcaacatgtataaatatgtatctgtcaaatgaaacagggttgaaggtctattaaatgtttctctcatgagctttaattttatttgcttgtttttggtgctacagagctcatactcagcatgcacttgacttctgaactatgccctcaagcccgggggaacttacttgtaaaaataacttaaagtgtgaatgttaacaaagcttcttttcttcaaatgagagattctctctctcttttttttttttttttggtttttcgagacaggatttctctgtggctttggaggctgtcctggaactagctcttgtagaccaggctggtctcgaactcacagagatccgcctgtctctgcctcccgagtgctggattaaagaaaagtgctttgcatcttcatatcaggaactattttgtaacaaactacaaagaactcaagtgccactgagaagtgaagatggttaaaactgccacacactcacagcatggaccacctctctgcagtccatatgtaattacagaactattgccagaaatgtaatgttgagagggaaaaaaacaagtcttaggacaatgcacaatacaacttcaataaaactagtataccgattgggcaatatcaattaccacatctttttttttttttgaaatgaacaaaaaaaaaatcatgcattataaggtattttccagaagcttataaatagcaagctccaaatgaactccatatttttgaggattttctttttacctttgcttctgctcaacggctttgtccaggtgtagaaagatatcctgaaacagggtgcagctggatcggctgttaatggtatagccgtaacttcgtttccaatactgtttcagatcatttaaatattccagtacctaaacgggaacatttcaaaagtaatttctaatacagttccagaaatgtaactgatttcctgattaacagtaattctcagaagagttgcactaatttcatcatagagcaaacagcacaatcttagctttccaccacccatagctgcagcagcagggatctaagggctgccccccccccccccaaggactcacagcgccttctgtgccaccaaaactttgagtctgggttaaagggaaacaaagatcatcagctctggaccctttcttccgatttctaatccccgtcaatgtgaattttttaagaaatttaagacaagagctcctagagaaactcagtgctagtcaaagtttaggagcagagttaggccagtgtgttggatcccaaacaaagcgcatcaaggtcagcaaaagggaaaagtagccacaaaaaacagacagattgcaacataaaaggaactaggtaaatattaagtatagtcagaaataaacgagtagaattaggaataaaaacagtagcaaattaccattacaaaaaaacccagcccgtgcacacttttaacatgtcatataataaacttgaaagtgcaggcacaacagaattttatagcaaagtataagctacctgacttgggaaaatctgagtaaacaaaaaccagactcaaagatctaaagagaagttgagtttttaagtgttgagggacaggtttgccagacagcagatctagataatgcaaatgacttttataggaaaatcctaaacacaaaagttgacgacagactaggaaacacagatgcatttaagcagaagagggcacagagctgtaaaataggtgacactatggggaacggctggctctttagtaaagacctgcctggctgctgctgaaccgacttccgggtgacttctatcttaactatcccgtcaccacaggagagcgtatattaacatctttccttccttgtgctgtcttgcatcagtgttttcagttctaatcaaatgactgacataaaacagccactcagacaactgttggctaaacaacagcacaagcggtccagcctttcacaaaggccctgactaaaaatctccacgatttagactaaatttagactaaaattttccacgattcttagaatggtgttaatgtttcttcattaaaatgtgttatacatttattgtgtgtatgtgagtgtgagtgtgtgtgtgtgagtgtgagtgtgagtgtgtgtgtgtgggtgggtgggtgtgggtgggtgtgtgggtgggtgtgggtgtgtgtctttgaatgggcaggtgtataccaagagtggaggtcagaggacaacttacagagggtggctcttcccttctaccacacagacttcaggagaccaaactcaggctgtcaggtttggcagcaaacacgtgtgcttgctgaaccatcccaccaagccatcaattttaattttcaaacatttcaagggagaatttcaaacataaaaatattcacaacagtagtatgacaatcccatgtgtacctctcatccaactccatcagcaatcaacctttagtcactcctgtttcaactatgctctagttaccgatgggttgtcctcaaatccctcacacaatttcatttcacctgtaaatacttcacgatgtaaacctactgcacagtgtaagttctaagttgtaagaaacaaaattacttctaatcaaatcactgaaaaggttaacacaatactataagatacccttacatattttcctaaattaagaaaagtatgtgcatgtgtgtgtgcttgaatgatctgtgtgcacaccatgtatgagcaaagccttgggggccagaaggaggcattagatcctgagatttggagttaaagaagggtgtgagccacaatgggcatgaatctgagtcccctgcaagcactgcaagtgctcttcattgctggccatctctgtagccacaatagattgtgaacaaaaactttaatttcatatatatatatatatatatatatatatatatatatatatatttgattgttaagttgtgttgtttaaatgcattctttgattacacagagccaagtgtgtacccacaatagagaaacctggcaggcaacattttcatgaaatgatcaaacatatcaaagatgtggcaaactgacataattctttgtaatgggatgcatttagaagtatctcaaatagaattcttgtaaaaaatgtttaatctgaatttatgtaagtaaaaagtcaggcacatgtaagacattttgcagaagaaaaaaaaaaaaaacctagactcttacaggacgccaatgtataacagaaaaagaaagctggagtgcttttcaagactaaaggaggctaaatagacacaccaccaaatgggatcagtgagccttgatgtgactctgaatgtaagaagatcatctataaagggctttatgaagacacctgtggaaattgtaaattgcatcattatatattatagttatgagatacatgatatgagaaaatatgatctaaatggctatataattatggtcttgtaggagaatgatcttgtttagatgcacaagtgttcactgtattattcttatagtgtctatcagtttgaaaatcttcagaacgaataaaagggaggactcacaagcaataagagacgtgtaattctaaaaagaaaaagacaagtctttaacattaaaaagttccaggggcatcccgacacgtagcatttaacagacaaagatgaagaggaagcaagagtaaatgttgagagtaaaaagtgcacgagggagggtaagggcagtacatgcaggtgatggatgagacatgagtcagcagaggcaggtatggccacctaaggagagcactgcacatggaaggtctttacacgggaccacacgcacaaagtcactcagaacaggcaagaacaggcagccgagtcaattacatcttaaatgttccaacaactacagtaacctgggcagataaattctgttacatgaaatttctgttatcaaaattctttgtgtatatgatactgaaaaccatctatctcagttatgattttcccctgcacccacgcagtgtgagtaggcaggagaggagatgtcctgacacatgtgagcggtgaccagaagcatctttgtatttagacttgtggaactatcaatggtgctctttttattttagaagtgtccagttaaaggggaagtgaggggaagaaagaaatctacagggaggagaggtagggggacaaaagtgggcaacagggggaaaaagtcaaatatctcatgctttctctcatatacagaaaacagaaaactggtttcggagggcagagaagtggggaagagaaacagagacgggcagaagaggggagagcaaggttattatatgacacacacacacacacacagtcaaacccattattttgtagctgactgaaacatgaaacgggactgggaaggtggtatagactcaggtctgaggggaaaacattctctctgaggataactcagctttatactggccctgccaattctcccagcagtaggtatttaacgagtttagagcccattacaggaggttactgggggatgagaacaagtagggcatccagcagtgactccgaggataaggggaataacaaactctggcccacagcaccctacagcagccatccactgagcatccttcactcctctcaactctcacaagagcccccctcctgcactggtacaggatccatggcatgacctttgacctgctgctggccacctaagccttcacagaacaaaataaagcaccttcatgtgcttgaaatcctgctatattggcaaggagcatattccgttagaatttaaataaattgggaagcaattctcgattcccatgtcaaacattgacattttaagttacgtaccaaggagtaaccaaggtccgagtctataatccaggacaattccaaaatactctctaatccaccctttctagaccccagcactcgagagtccagcaaaatttagctcccttagagtcatcagaggtctctctgtactccttcaaagtccaccaatcaggtgacaagggaaatgaaggtgactgatgaaactgtggtgcattactgccaccaccaggtggaaccaggcacctcttagtcaattgctcatgattttgatccatgggaggaaccaggtctgtgggaaacgggtggctctgagtgtaactcagttttgttttagccacctctcccaggagtgggtttttaattgggatggtgggggtacctagaaatcaacttactatgaaaaaaatgtttttctgagttctgtgaacccaaattatttacctacttaagcgtccatccctccttaggaaaactgggaactagtcacaggcaatttacatcccctaatcttacttattttctggaatactgttttaagtaaagaacaaaataaaagtcagtttttagtgactaaaaaccatgaggaaaaaaaatacaaactgaacttacctttgcatcatctacatcaaacacatcacaccacggagaatggacacctttaattgccaggtcaaatgaacaggtgaaaaaagccacctgaactaagtctgggggagaaaatgggtaaaatttgccggttattagtttctctagtatttaaaggctacatacccatagagtactatgtgcatagttacacaaacagctgaaaaactgagcatttctggagacgagactatcagaggatcaaggcttgacctgtgcaatgcaaacagacaactgtaatcaccagaagaaaccttgagggagacatttcagtccatgagattacaaagcagtctgcaaatggcaattttatagttttttaaacctagttgatttctaagtgcatgttgcatagcaaacccaacaacgggttaacccaatgacttactgaatagaactccacactgatatttttagaagggtagaaaagggaagcaaaagttttaaaagttttagtccttacttgcacattaataatgacagtatatttactatcagtttttaaaactacagaacagttcacatagtaactattaagcatataaacagagacacaaacaatgtgagagaggaccacagaagattgagaaggaagaacagaacgaaggggtggagaaagaggaagactgcaagcagagaacaaggaaaggaccaccccatactagcaagaacggaaggttggcaacttgataataagatccatttttcaaactcagctgcctaagaaatttcagaaccaggaaccagggatgtttagactattaactgccttcctttaacaagtgggtactaaagaaggggatacatgaattagtgcttggactacgaaaggaggcctggtcaaaaggaatcacacactgggtttcctagtaaacacgtgggaaacatctaaagttggagaggtcagggagtgaagggatgaggtcttaaccataggggctgctaccattactctgatttttggttgattttactgtttttctttcccaaaggaaaatgaaaccaagattaattaactgatattatatacattccgtatcagttcagtttaaagaattcctgaggtaatatatttaacagaaaaatacatttgggggttggaaagatggatcagcagttaaaagccccagctgctctgatagaggactcaggttctatttccagcacccacgggaaagctcacaatggtctgtaatcagttccagagagtctgacccccctcttctggaatccatgagcaccatcaggcaatacatgtggtacacgtacatacacacacacacacacacacacacacacactaaaatcttttttaaagacttgtatttatatgtcattatgaatatacatagaagccattggaaactttggcttctataaagatgaaggctttataatcacaacacctaataaaacagagtgacttgctaacactgtggatgtctgatgacttgacatggctcatttggagcctcagttctagctctcaaactatgaggtggtgtattctataaccagaaagcaaatgaccaaacaaacactttaccaagtcaggtatagtggaagattttaactttatccccctcccaccaacaccttcttcttcttctaatcttttggaaactgactcacaatataatgagacatacaatcacttcactacatattaatattcaccaatacccataataaattaaaaagttctggaaaaataagacaaaaaccttcattttcttaattttcaattgctaggtgaccacgtgtcctgtttctcactgtggtcatctactttcactctccaaagtgtcccagccacaggcagccgattcactacaacagttcaagacagatgtgtctactcctgcccttggaatctacctgtaacagctgaaacccagcttacttttcactttctaaaactaccattctccacagtaacatgcactcctaaagtttccccaagctaaatgatttacatgacttttttacaaagagataatttagaaaagacggtttttaaattataagttatgcttagagatgagactttcacaaaaagtccacatttaagaaccttgtatagctgacctgaacaagggggagctcctggtccccacactgatagctgggaaaccagcataggactgatccagatcccaggaacctgggtgtcagtgaggaggcctcagaaatcatggggcctcttatagtagatcagtacttatccctagcataggaatggactttgggagcccattccacatagagggatactacctgagccaagacacaggggggtgggcttaggccctatcccaaaggatatgacagactctgaagatcccctaaggaaggcctcacccccctgggaaacagaaaggatatgtgataggtagggttttagttgggggggggcagggaaggaggggagggagattgggattgacatgtaaaacaatcttgtttctaattcaaataaaaaatggaaaaaaaaaaagaaccttgtatattgctggacattggtggcttacatctttaatctcagcacttgggaggcagaggcgggcagatctctgtgagttcgaggccagcctggtctacaaagctagttccaggacaacctccaaagccacagagaaaccctgtatcaaccccccccaaaaagaaagaaaagaaaaaaacccaaaaaagaaccttgcatattaatttataaaagtttaaaatacaaaaataaaattaagcatgtggtatataattttcctgacccaagacatactatttagttaacattactataattttgaaccctaagaagagtaactgttttgtttacatttaacactttcaaaccatttaaaccagaatttaaatgaaatacaacagattttatttatcattacctgcatttaaactgcttactggcacttgcaaagtagctgcaactttgtttaaaatcttctgcatttcaggtccagttttgaaggcttctacatgataaagagctgactcatttctttccacgtcagttaaaaatttctcacaatgatcgaagaacctcattagtttatcattaattcttggagggtcacactccatatctgaagtgaaaaaagcgtacatgtgtaaatcattggcataagtgacaattactgaaatttaaagtgtgaaaagagaacatttaagaaacatttaagctgtttctgggggctggggtgggggaaacatcgatcaagagactggtgcagttgctagtggaggtggaagaggaagtcaggtcccggggcgcagggcgctgggcgctggagttcacagatagatgtgcgtcgcctgatatggtacctgcaacggacctttggtcctctgcaaaagcaatactctcaaccactgagccatctctccagccccaaagagaatgttgttttgttttgtttttgtgaggtgtttgtttgctctgcttttttgaggtattgggggttaaagtcagggcctctgtatgctaggccagctctctacccaccaagctccaaccccagcatagcttcttcatttataacaattataatgtatgagctgatatactagaaaagactttaaaaaaagtaggttgagaagaaatgagttaaagcaatactataccagaaaattatgcatatataaaatacatgttttcttaaagcaagaataatcaaggaagtgtaaaagtgcaaagcagttgtgaagtattgcttccctgcagcatacgtgcccttggaaagcaaactagaaaccagcagtttccagacacctggtggaaaattggacaggtctgcttctccccactaagcaaaactccaagcggagcatttcattttctcaactaatttctaatacaaaatattctgttttgacaaaaactactagaaacagcaaagcaacatggatgttgtaggtctactgtttcatgtcagaagccaagcacatttggtctagctcctcttctgcctgaagctctcagacggcttccgggttagcatttactaggttatattatttccacaagttggcaacaaatatttattggaaaagcattcattattatgcttcaacttgggtccttttcctagttatattcaaaacatctcaatcatccttctttgactaggaaaagaacactaagtatgtttctgtatatgaacatgaaaaaacatgttggatatatgtgcaaaaatataaatacgtacataaatatattcctccaaacggtaattctgtctactctctttgctaattggattatagttcttacagaaacatcctgtataagagaattctgtcatcttcctatatggccccaaagaacaacctttcatttgtgttaccaaattacatattctgtttctatagaaacctaaactatgattctgtggcctttctcagaagtccagatgtatacaatagacaaaacaaccctctgcagatgaaaagggggtggccaggggtgagtttaacttctgggactgaaacaatgagggttagatttgccccaatctgtttccatccctggctttgtactcgaggcaaatgccaatcctcacaatgcaatttgagtaccataattcatttatcctagtaggatggctatggatacacacacacacacacacacacacacacacacacacacacacacacacacacagttacacagtcacactgtgctttttaaaaaatggtatttttttactgtgcagctagcaggactcagttccctcccttcactatgtatactcagtgatccaactcaggccatcagacttggctgcaagtgcctttacctactgagccatctcaccagcgccaaggtgctattttaaatgttctagctttgagactcaagttaatgttaatggatttaggaggattttcattctatctaatgaaaaacaatgtagtcatatttaaaaagcacactcaaataagcacacatatgtcagccagctgagctatccacaaagtaggagcatgacatacaacactggggaagtttctagaagaggtttttaagtgttacggaagaaatgacaaagtgagttcttccagtttttggagtctccaaaggctcatgatgtcccttacttcagttctcttcttttaaaactgataagcagttgctaacacttgctcatcttttggtacaaaaacgttacatgctattttcaggtaagtacacaggtaagtacaggtaagtacacagatgtatggtgtaacggttgagagcaagttctaaatctaaatttcctagatccacatttagctgtatgaaaatgggtaagttatttggtatttttgtttcagttcttcatccgtgagattggcaggggacacaattatcgacttcataaagcaacggtaagttttcaccaaactaaatgtgaagcgtgcatggcctacaagaggcattaagtttgctgttaacatccgcagcaacgaaaacatttaggagggaaaaggcaccaatctagaaaagtccacaagcctggattctggcctgactggtcataaactatgtaagggcagcgaaggagacacactaagacgactccgcccccaaaagctcccaaattctgaaacggtgtaaggatggagtaagttggtaaggtggtgtgcatgcgatcatatatcccaggtacagcgagggaaacgctacagtaaacacaggaacacaacagaaggggacagtagggcatagagagaatttgaggggtggcttcttcaaacagcaagtcaatgtagaaacacctgaaaagaccatgattttaaaaaaaagtccaactcccataagcaaagcagagggagaaagctctatattattttaaagaatgcgcccagttgagaatggggtatgtaaaattaggagcgatactttcccccccccctccttcctgctggatctccggggtcccctacagcacccctggcgcagaaaatgctaggaattcatatctgatgagtgacgaaacaagcgtacaaatgaaaataaccgagacagcgcaaaggcgggtggcggtgggagcgtgaggctggaaagggggacgcgggcagaggctgagctgggggtccggatctgggggaggcggggcgcgcagtctgtcacctgagacgtcgggcggtggcagtcccgggtggcagtgttgccacagcccttggaggaaggcggcgctgctgtccacacagcggtgcttggagctggtgaccagccgcaggcggccgtagttctcccggctgaagagatctgggaagagggcggccaggcgcagcgccagctgtcgcatgtcctgccgccccttctccaccagctgcccgtccatccagtcatcgtaccacagcggccactccaccagcgcggcgcccactccgcccccgcggtccccgggtccccgggtccgcagcagcccctgcagctgcctcagcttgcggatctgcttggtcgtcgggtagcgggtgccgtgacggatgagggcgaccagctgcaccggggtgcaggtccccgccagcagctccgggtcccgccgcggcgccaccgggtcgaccagcagccaggggttgacatcttcgtagcgagtcttcgtgccgaagtaggggctgagcaccgaagccaccgggtcgccgcgccccgggagagagcagcgcgcgaacgacgagagcagcgccgcagccaggaccgcggcgggcgcgaccgaggccgggaggcgggtgcgggggccggagagcatcgtacccgggggcccgcggagggcggcgcgcggcggcccacacccccacttccggatccgccggcggggggcgggagtagagcgcgcttccggctaggaaccgcggagggcgagcgtggtccccggtaccgagactccgagcgagcgagcgaggcggaggacctcggagccgcggtgtgtgtgcacaggcggagcggcggaaaatcccgaagggcgtgcgacaacgggcgcaggtggaaccggcgtcagctgaccccggagcgtgggcgactgtctggcagcttggcgcctcgggaaccgacgtcagctgttaaggttttatggtgtgctgatggaatccgaatccacatcaagtcctggttctgggtctgccaaaagagaattctttgtagatggcttctgtctcgtcctttactgtgtgtttacctcctgaagcacttctccccaccccaccccacaaaaccccaccccctaaccccttcttgttagagtttgaaaataagcaggacacatcagaggcatgaatttggaaaagggcatattcagagattgaaatcctgggcccttagtgtgatttcaatcaggctagagctgactacacaacatctcaaaattgtatgcttgttgagccccaaggctaaacacagccgtccttataatttgggtacactgagttatggcctagcagatgcaccccattattaagtatgaactcatctgctgtatggaggaaacacccacatttctcccatggggttagataggcaaatcagcacttaaatttttttttgttttggtggggccgctggtggtttcgagacagggtttctctgtggctttggaggctgtcctggaactagctcttgtagaccaggctggtctcgaactcacagagatccacctgcctctgcctccctagtgctgggatcaaaggcatgagccaccgccccccccaccccagcggctcttgagttttaaagatcttgatgtgcatgtgtgaaccaagatgacttcgtgtgcaaccatatgtgtgcaaaagccatatgtgtgaataaggcgttggagcccctggaactggagttacaggcgggtatgagctatcatgtgggttttgggaacttaactcgggacctcttcaaaagcagtaagctctcagccactgagccacacctcctcagcttcaacaattgagtgtctgttaggctatatagctcagaatcttacactcaaaaatcatggactctaaataccttggtttttctaccagaaccgcagaatatatgccagttaaaccataccatgcgatgatccgaatcaaggaaacgggccatattttgcaagtggacctttcccttaaagacactgccaccatctttaacctttgagttaagcatctcccctctagaaaattgtgcctctaagtactaacaagaaggaaatgctatacaatcaagactaaactccaatttaaatgctgaaaatttaaggcattatgtgcaagaattctgagacaagtgtgcactttttgacatgtcattttgtagactctgggaaaactaaaaattcgtggtcagtcctatttttcacagattagttaaattagtatttactgaattttaagccttatactttataggctaaggcgcttgtttggttgtttatttgttttcaatatgacacattctttccagttgctataattttatagtttacagagtagtaggtttccttatggcattttcataatacttaattttggttatacctcctcgagccctgcctctctcaatctcccagctccaaaccccacttaaacccttctccagtatccttccatccttactaaatgtgtccttgcccaccccttacccttgataaagcttcctctgctcctcatggaccccccttttagtttcctggtgtctacacactcatgcatgtatacaccaaagaccaaaatctgaatgtgagagagaacataggatgtttgttttttgaagcctcaatatttttcagttctatcagttttcctaaaaggttttatttttttctgcatggctgagtaaaattccaatatatatatatgtatatatatatacatatatatatatatatattgtgtgtgtgtgtgtgtgtgtgtgtgtgtgtgtgtgtgtgtgtgtgtgtatgcacatgtgtttgcacgagctctattttcattactcatctgttgatggtcatcttaggctgatttcatttcctagttctgaatagagttatggtaaacatggctgatcgagcatctctagtgggatatagacttctcagggtgtatgcttgagtggtgtagctgggatgtacagtagtgctaatttgcagcttttttagaaacagtgactgacataatagctctatctgtttacactcccaccaaccctaacacgggcttctcttttccttcaccctagccagcatttcttgttgatagtcattctgacgggggagatggaatctcaaattagttttaattagcattctttagtcactaaggatgttgaagacttttgaaaatatttattggctatttgtatttcttcttttgagaattctattcatttccctggcctgtttttttttttttaacttatttttttccaatacagggtttctctgaatggcccttgctgttctggaactcaccctgtaaaccaggctggccttgaactcacagagatccgcctacctctgcctcctaagtgctggaattaaaagtgtgcaccaccaccacctgacttttttttttcattttaaattaaaatacaattacatcacttccccctttcctccctccaactcctcccatgtctcccacaagaccctctcaaattgatggcctctttttctttaattatttgtaacataaaaaaacttcagtgacagatataggggttcaacctgaagatcagggaagcaagtagccaagttaccagagaactcttaagtgggctggggcattcctattctcaatgtggctggagaatgaatgcctgatactgagaccttgctcctgtcttatatacctctcatgagccccgggattaaaggtatgagcaataattctcttttagacggattcagtcttgtaaagatctgggtgtcctcaggctcacagatccacctatctcttaatcctgagtcctagaattaaaggtgagtaacaccacctcctagcttctgactgctgggattaaaggtgtgtgcctagcttctatggcttatggctgactttgctttctgaatcctcaggcaagctttaataaatcataaataatatatcatcatagtcattaattgctatatatatgcataaacatacatatatgcataaacatataaaaataaaaatacaaccttcggagtccctttagtattgcttgtgcacatatgatttcagggctgaccattttggataaacaattagggagctcataccaacgagagactgattacctctctcaacagtcattaggtgcctggagttctttgtctaggggtggtgatccatgatttctttttctttgttagcatgcttattggtggtgtcattgttcaggtctgtgtaggcagccatgatgttgaggtgtcatggatgtacctctcctgtcatttctaggagaccccatctcacaactgctttcccggtcacctggctcttacaatctttctgcccacctcttctgcagtgttctctgacctttaggtgcaggtgttgtgttgtagatgtatccactgggactccccgtgatcagtcgatcacagtatcatgaccagttgtggttttctgcaatgttcttcttttgctgcaagagaagctattttttgctgtaggggtaaaagttatactttatctatgggcttaagttttagaatgcagttaggaattatgccagtctcataaagtgatggcagtgagttctcctttaagattcatgacctcactagcctcagatagttggcaaggtttctagtaccagacattatttctcttttgttgagtgggctttacttccaactagacagcccgggttaccaccatgatatgagtaccactgttccttcagcagggatatcttgctaggctgctagttgagtttcataggcatcacagctggatagcattattgattgcaccttcccccttggcatcttaaatagtactttctgttctatggaagctagacagaagcaatcttctgggtcttgtgtcccagtttgtagtgcaataagttcagcaataagaacttaacttcgacctctgagaggcaaccaagggcaacagcaatggcctatgttgtattggaggtcacttggactaccctaagcaacaactcaaatggagatttccaatgcctggtactaggggtggttgtggtacatatacaggtaatttaaaggggaaaatgggaaaatctggaaaggagacttctatagaggaggggagggaggtcaatacataatgagaggggtggctgagggacaagtaccattaaggatatttcataaatctccagaaatcattatttcctattgttgtaaagttgtatctaatacatatatgcacatacatataaacatcttaaagttatgccacttgggctgaccatgcttctcacaagccatagtatcttttagccaatttttggattaaattgtcttctttttagttttttgagtcctttgtacattcaggatattaatctgtcaggtattgcttgataatcattcaggaaatatgtgtgcctgatagaattacaatttgtctaacacaggtgtttaataatgatcaccttggaaagaaatgaccactttgcatgctcttgcatccttagttgctaccaagccttcacctcttcctggctaatcagtctgtagtgaccctgttcaaactacatacaaaatctaggatatactcaaacgacataacactaaatttgtccctagctgggtactatttccctcctgattatctcttaagtttattctgttttgtaatcttaggtaaagccaatccttgtctttttaatgtcatgttactctgacaaggattaaagtaagctatgacatgttttgaaaagagaatgtctagatagcttctaaagaggacaaagagcccacaagctctggacagagtccaagctgtgactcactaactgagggcatcgataagttatctaaactctctgagcttttatttccatatgtgaaaacttcggaatcttagaaccgacactgtggggttattgacagagatacttaaaacccatataagtgggtgctgtgagttgtgttgtattagtagcaatgtttgatgtttttcctgcactgagccctccagcagttgtatagtgtgtatttatttccacaaaacattcaagtaaatgactcttccacaaacttgccacagagaaaactgtacaacttatttaataataaaaatccactgtgtctccactgaatcttctagaagagaaagtgggaactacccttgaacaaattggcacaggagaccacttcctgaacattacgccagtagcacagacactgaggtctgcaattaataaatgggacctcctgaaactgagaagcttctgcaaggcaaaggaaacagtcagtaggataaaacgaccacccacagaatgggaaaagatcttcaccgatcccacatctgacagaggactgatttccaaaatatataaggagctcaagaagctagccaccaaaacaccaaacaatgaaattaaaaagtggggtgcagaactaaatagggaattctcaacagaggaatctgaaatggctgaaagacacttaacaaagtgctcaaaatcattggccatcagagaaatgcaactcaaaacaactctgagataccatctcacgcctgtcagaatggctaaaaaataccaatgacaatctatgctggagaggatgtggagaaaaaggaacactcctccattgctggtgggagtgtaaacttgtaagaccactctggaaatcagtatggcggttgctcagaaaaatgggaatcagtctacatcaagatccagccattcctctcttgggtatatacccaaatagggcatgtacttacaacaaggacatttgttcaaccatgttcatagcagcattgtttgtaatagccagaacctggaaacaacctagatgcccctctactgaagaatggattgagaaaatgtggcacatctatacaatggagtactactcagcagaaaaaagcaacagaatcttgaaattcgcaggcaaatggatggaactagaggaaaccatcctgagtgaggtaacccagtcacaaaaagacaaacaaggtatgtactcactgatatatgaattttagacatagagcaaaagattaccagtatataatgctcttcaccaaagaaactaggaaacatgaaggactctaagggataaatggtccccaggaatggaagtggcatgaactcccgaactaattgggggcatgagggtgggggggaaaggagctgctacaataagagcaagagaagaggagaagaggagaggaaatggaggggcagaaacattgagttgggggaagaatagaggaaagagagcaagatgagagatacgatatcagagggagccactgtaggcccgagaagggatcaggaaccagggagatctccagagacctacaaggatgacacgatctgacaatccaggcaacggtggagaggataacctaaaaaccctccccctaaaatgagattgatgacttctatttatgacatcctagagccctcacccagtggctgatggaaacagagacagacatccacagatatacaatgagccgaaatcaggaatttagttgaagagagggaggaatgaagaacaaaggggtctgtactaggatggagaaacccacaggaacaggtgacctgaacaagggagagcacatcgaccccagatgctgtccaggaggcctgtacaagactgatccagacccctgaacatggatgtcaataaggaggcctctgcactccagggagcctctggtggtggattagtatttttccctggtgcaagaagggactttgagagcccatcccatgtgaagggttacactctggccctggacacatggggaagggcccaggatcagcataggaagacttggtggactttgcagagcccccgttgagggccctaccctgcctggggagtggtgggtggatggggtgggggaggaagtttgggggtgaggggagggagagggagaagggacttgaaataagcttgttccctaactagaactaataaaataaaaaaaagaaaacagcaagaaagaataggattacaaaaaaaaaacccactgtgtctcatatagtaggctgttaattcttagaatagtgagatttagtaggatgagaaactatgttttcatgtcaagctatgtcttaattctctgatccgtgtgtccattggctgtccctcgagagaactgctcatgtccagatctataatcaggtggagtacacatggtacaaaaagcttgactgccctttgtggaggccatagtgagtcactctcccacataagaggttgtggaagccacagcaatatttttgacaaatctgtcacaacaagagacaaaatggaaaagtagtgtcagggtatttgaagaaatggaagaaaatggaatccagaacagagataattgaattagtgccagaaggagaaaccttgtcttttcagtgaggatggggtagatgggtgaatgtacggcagagtgtgcaggccgtgtagtagcatggagttcacaccagatggccagtttctgtagtaatgctggaggcaaggttacctgaagagagggagagacaggagtgcagttttggaaagtgtacctgacgcactgagttttgattggcttgaatttgtaattgagacaaactaaagagtgggaaaggatttgtaactaaaagtcaattagtcagctttgagagtcgaagaatagcagacttggacctctagcgattgtataattttattcataagtggaaattagctgctgcatttagagtgggaggaacgcttagctcagccattttgcttaagtagaactttttcaaccaactacactaaagaataggcatattccttctgcatgttatcgtaggacttctaaaatagccattacaatcataacatcatacagtaccatagatagtatcttagtgacagtcatttgctaaaaagtcattgctttttaaagggctatactacataacaacagagaccctcatagtggatttttcaactttaaactcacacttcattatttactctccacgagatcttaagcaagttaagctcttctgcttctccgtttcacctattaagtggcaaatatacatataactacacttagtatcacctatggcttgaggttaaatgagacagttaacataaaaactgtgtgtgtactcttgctccaccctactatcagttatttctattaggcagcatttacatttttcttatttccacttctcccctagtaaagcaaactgacagatggacgttttcttcatagatatttattatctcacagctacattaaacaactgactttgtgcctctgccaggaaagctactgctcgattatcttacggccctccagttgtatcatccttctttctactttttccagttgttggtttaatgtctactcgctgcttttcaccacagcaactacctggggaggagatgatgtaaaatggatggagctggagtgatccttgcatcgatggcatttcctttaaccttgcttgattgtacaacctgttcaggtcaccagtgccgcagactcttaagatacgtttgctcaaaaacagtagctagccacagtttgttgcctagcttacctacactgaatgagtcagaattgtgctttagctcatgtggagaattttactaagctacataggcatggcaatgacatgctgattgtattctccattatgccctgcttgaagacattaacaaagctgtacatctggtatcctgacatgtcttaagatattggtgttaatagttttctttttattgaaatttggctccaaatcatgcacagaccaagattctgatagatttaagttactaatattctttgcatcatttgtcattctccatttagtggatgaacaattgctacacatttgctggtcctttctgttgatgttcctgtgtaagttagcattgctgcttagcaacacaatttcctctagaagtctcctatacctaaaataaattgctatcacattacaaagataaataataactttccaaaccctcctttaaaaaaaatcttgtcttgccggtggtggtgcatgcctttaatctcagcactcataagacagaaacaggtgggatttctgagttggaggccagcctggtcttcagatcaagttcgagaactgccaaggctacaaagagaaatcctgtctcaaacaaacagcttgtcctgagaacaaagtatataattatactttgttataattagcatcttttgtgtgcagtgttaattttacaaaatacaaagtcttttcatgcccttgggtcatagtggttcttctattttgttagttctttagcaggaaggcagatttttaaatttagtttatgaatgtccatttctgcaacctacctctgtggtcaatttaaaacaatctttttttcatttttaactttgtttgttgtagttggaaagcgtttttgcttggattgagttggttgtctgcctttggtatatcagcaaatactaaatgtcaaatagtatgtgacacttgtcagaaggcaataagtccctatatacctacacacattgctgcagccaccctattaaacaagacagtccactgcccatgaaagcaaatctaacggttccacaaacaacagcctttattcccgaatgttacctttcccatctctcctgtctgactctgtgctgcaagagataagacaacgctgctaaaaaaccattaataccttatataggagccaataaaaaaacattcactgtatcttacagtaagtaggttctcggcaattctttgttgaaaaggtggctgaattctttgtgtattaggtgtgggtataaatgagtgaatgaaaagagaaatgggtggtatggaaagctgcaatatgaaaatattttttcttgtatgcagtttatttattatctcgtttcatcttcccagctatctcatgatgttacagacctacactgtaacatgttgtgaatgcagagaagaatttgcatgcctttcctgaagttacccaaaaaggagtaagttacatcaattctagaatgtaatcaaaggaagtggagcaatcctgtgtttcttttcctcagaccttttcttcctttctgttggatttgctctcaagtgttgcttgatttttctgcaatcacttattgagggcaatgaaagtcacaaatgatatatatatatatatatatatatatatatatatatatatatatttaggtttggagactgttctggaactctctttgaagaccaggctggccttgaactcacagagatccacctgcctctgcccccctcccccagtgctgggattacaggcatgtgccaccaacgtccagctcagatgttatattctaatcccattttgttggctatgtataatcttaggtcttttaataccatagcctatagagtgtggaaggtagtgggaagattagaaggtgggtaaaatggaatgtctgtgatggaggtgggcttgggacacttgtagacaaggtgaaatgtaaaagctaagcaggagatacaaatggacatcaaacagatggcaccttcttaggacagagcctaagaaggtagcctatatgtgggccacaccttacgggagggtttcagaagctactttacagtaatatccatgctattctctcaagtgagagatcaatgtttataacattatggaaagttttcactgtgcttgttttctgtagtctggtttgtcaatagcacgatgacctaaaagtgagggagatgattctggttcttcctgtaaacatctaaaaaccctctgttttgttgttctcctttttaaactattttaactttttaagatttacctattttatgggtaaatgcctagtgcctgctaaggtcagagagggtgttggatattttagaactggaattacaaatggttgcaaccatgtgggtgctgggaatcaaacccaacaactactctaaacctctgtgccatcttttagccttgtagaagttcactttggaaaatgtccttatcgtttgatctaggtggattccttaatgactgcttgtttttattgctaaatatcttcataagaatgttataattgatacaaaaactgttcacaaatgttaaacaaaaaatgtaacaacacgggctgttctgtatctgatgatgctagagacatatatttattattatgttttagacatttgagaaaaaaatttcctgagtcttttacaatcagttgaatagagcatcatgaagacaaagtaaatagaaaaaattaagttaaaactagaaaaataacacagtcaataaaattaaaaaggggttctttaaaaagatcagcaaaatcaaaaatccttaggtcaattaagaaaaaagagcaaatactcaaataacataataaatgaagggggaatttaacacttcctgaggacaaaatgattctaagaaaatatgagcagctgtgtcctgtgaaattgtataggtaaatgaaccagtttgtagaaactcacaaactactaaagctgattcaagaagaaagcagaaatctgaataggccagtttcaagaatggaaataaaatcagcaatgagaaatgtccccaaacaagctcaggacaagatgacttcattggcatctttgtcagttatagagagtctgcactttcctttctcaaatacttccagggagggtagaactcctcctaactcattgaataaactagcatcaccccaacgacaaagacagacaagtacatcacaaccacacactaagagaccttgtaagtgtaagtgcaaaaattctcaccaatagaccatgaaatgtaggattcaacaccacagtaaatgggtcttgtactattatgtattattcagtgacctttaataaagaaatttaagatttgttcatatatgtatatatcctaatataccacattgataaactgattgttttttgaagccataacaagataagtctatatttatttttggatgtttgaatctcactattagccttgactggcctggaatttgctatgtagacaaggctggcctcgagctcacagaaattaaccttcctctgcctcctgagtattgggattaaaggtgtgtgctacaatgcttagcttggcaactcaattttaaatgaggagagtaaatatatatcctctgaaaatgaaatacataacacattaaaagatgctaatcaaaaaaaaaaaaaactcccaggaaaatatacttgatgaacatcagaagagctgacaaagatgtggagaaaatgaagacctggtatattaggatattaaacagtactttcactatgaaatgcacttagaccatttcttaagaagtaaaatatagaattgccttatcactggtaattcctttcataggcatggatttccaaagaattgaaaacagtggttagaatcaattcttgtactgaaatgtctgtagccaaagtagtcacaatatcctgaaggagaagcatccatcaacagagaaatgaactgataagatgtgatgtacatatgaaagggaacatttctcagctaaaaaagactgaagaattctatggcaaatggattagctgtgcaagcaatttgccaggtacagtaacccagtcacagaaggttaagtactttgtgataggataccacttataggcaaattcatggagacaagattacagtaggcctacctagaaggagagagaggaggccctgatgagagaagaccagtattttataattaggcttcactggttattaatgcttagcgtgatggctgccatggagtttccacctttagaccaaatcccgcggggtaaagtatctcttctcagcatgtgcattcactggtcttctcagaacaggaggggagggacgtgcagtgataaagctctagtcagcttagtggcagttgaagatagccctgcggagcacaatagtagcatcttgtcagaaagatgaggttgccagcaggagatcaatactcacctcagctgttgccaagagctggaaacaagatcttagttccttatcctggatatggaaataacgtctttatgacaaactgagcactaaacatacaggtattaaaataatgccgccatttgttcatgtattccacagtcatttactcaaagttgggagctcaatatgtcaatcatcctgttcctgctaggctctttctttctggaggctccagcttgtccttccctgccttagatttgagaatttagaaactagtaattgaagccttcagggacagagaaacttatttctgtcctgttcaatggaggaaggtgagtgtactgaggagagggctagtaccaacaggttagagcccacaaccaggaactagctagaattatggtttcctcaatattctttcacttttctattacaacagtatactttactctcatcatagaaagcaataaaacttatctaagaacagagacaataaaaaatgtgtttaaaaagggaaattatttttctatttttttccccagttcatcaagcctttctattgtttgacaacattctttaaactgttgcaaaacatttgcaagttggctaaaggttaatgtctctggttattctagactttcagaaggatcacaaacatcatgcacagtatgaggcaaccaatacttaacactgctttaagttaaagacttggctgccgggtgtccagaagcctctcgcgttgcttggattgtgatcctcttttccttggaagtcaggaaagtttttctgaaacaggtttgtttcacttggtatgatgatctcttgtaccatccattttctggccagtgtcacaatttcattcttctttatagtcaaacaaagaacccttgcaatccattcatgttcggtgaacaccaaggccgattccagaacttgactgttgtgattggctactgtaaacatggacacactggtatctcagaggtttactgcctccagagttccaagactgggatgtctggatcacatggtagtcctagttttagtgctttttaggaacctccagtgattttcatcgtggctgcaatagtttatatttctaccagcaatggataactgttaccctttgctcatcatttgttgtcatttgttttcttggtggtaacagatggaatctcagtgaagatgcaacttgcagttctctggtggctaaagatgttaaacattctccctgtgtttgccacccaattgtatttcttttgagaattgcctgtacaattcatttgtccacttactgactggatggtttgatttttcacgtttaatttttaaatttttattttttgtgtgtgggtgtcctgcctgcatctatgtgtgtgcactgtctgcatgcctggtgccttcagagccagaagaaggaactggagttacaggtggttgtgagctatcctgtatgtgctgagactcaacacagtattctggaagagcagtcagtgctcataaccacccagtcatcttttacattttttgcatctttttgaggtctttgtacattctgtgtgctaattatacgtcaaatgtacagttggccaagattttctctaggcttgtatgttgtcttttcactctggattgtttgctgctccgctgtgcaagcccttttaatttcatacaataccatctgtcaattcttcctattatttcttaagtgattggtgttcttggaaatgtcttgctttgtcttgatcttcaagtgttttcctctaatgtttctaaagctctaggtcttaatgtctttaatctattttgttttgattgttttctgactgataaatatagatctagcttcattctttcacgtgtgggtgtccagttttccaagtatgttttgttttgtcctttgtccaagattaggttgctatagttacttggacttacttccaaatcctttattcgattttactattagatgtgtctgtttttgttccagtgccatgttacttttattagtatagctatttactgcagtttaaaatcagatattgtagtatcttcagaattgcttttgttcttagggttactgtacctatttggagtcttttttgtgcttccatataaattttaggattttttctcccatactcctggagaggtagtcctaagtggtgtaagaaagcaaactgagcaagctatggagagccagccagtaagcaatgttcttccatggcttctgcctcatttcctgccttcaggttcctgtcttgagtgcctgccctgacttccctgcttgatggactgaaaactgtaaactgaaataagtgttgtatcttagcaatggaaagcaaattagaatggtatctgagtagtactgtactggtgtcacaatgagtttggtagtgtcacttcccccttctgttttacaaaatagtatgggaagcattggcattatgtaaagctctggtagaattcagcaatgactccatgcagccctggacactttttgcttgggagattcaatcttgttgcctattatagatctgtttaggttgtttataaacactgattttaacatttgtgggtgataaaagataaatatggtatgtactcactcatttttgatttttagacatagagcacaggatcactagcctacaatccacactgccagaggagctaggaaacaaggaggaccccaagagaagattgcatagtccctcgaagaaggggatggggacaagaacccctgaccaaattggagcctgggggcagggagaggaaggagagtctgcatccagttgctgttcaaagcagaaacaaatacccacagctaagcactgaaccatagtactggaattcagttgtggagagggaggagggttgagcaaaggagcaaagatggggatggagagacgtgcagaaatagtggtcctgacttactgatagcatggagatcctagtcataaaactggggaaacagcattggactaaaccaacccttctgaattcgggtaccagctaggaaaccaagacagtctatgggtcctctaaaagcagaaccagtctttgtccctagagcacaaatggactttgggagcccactccctatggagggatactattacagcccagatacagcaaggagggcctaggtcctcccccaaacaatatgacagactttgaaggttcttggtggagggcctcactatccctaaggaagagtgggggggggttggggtgtattgggaagggaacatgggagggttagggaatgggggggatggatatgtaaatatgagtaattaaaaataaattaaaaaagaaaagaaaaaacatttatgggtgataaatgtgcagaaatgttgccatttcacccatattttctcatttctggaaatacagattttcaaagtattccttcatgatcctctatatattaatagtatttattgttctgccctcctttttcatcactaattttgttagttgggggttctctctgtttgtcagtgtttatattttcaaagaaccactgtttgcttcattgattttttttgtattattcttccataccactgatttctgtcttgaaatcaatgtctgtctttatttctttgcatttagtagattgtatttgtctttttcttgtgtttctaagacctggaagtgtgtcagtagcttggaaatgtctgatatactaatgttaggcctcacacccatgaacttctctgttagatctcatcccaaaagttctggtaagttttcgtttttattttattccagaaattcttacaatttcttccattattttttccatgagtcaccaatcttttcagactatgtttcacaatagcaatgtgtttgcagagtttctcttgctgttttgttccattctgatagcatttgggaaattatttcacggggcagtgatggtacatgcctttaatccaaacacttgcaaggcaaaagaaggcagatctctgtgagtttgaggccagcttggtctacagagtaagttacaggacagccaaggctccacagagaaaccttgcctcaaaaacccaaatatatatttcaattcctatgtattttttcagattttcagacactatagctattgcccatcctactgtccttatacagtatagtaaataaactcttttttctattctggcctaaagaattaatttgttccctgtctctagtgccttctctgctactgtggtggactcctgattctctacaagcaatactgtgggagggaaacctggtaatgagagaaagggtccccatgaggagattttcaaaagcttagtccaaaactcccaaacaagcctaagcatagtgatgtacatcccagcaataaggcggctctgaaaaaggattaggaggtcaagcttgaggcacatgtgatcctatctcaaacagcaaaaacagactttccctatggcccagaatcagtttcttttggagatagttccttgggttgctgagtagaatgtctatcttaaagccgtcaggtggactattctgttgacatctgtgaaacccatttgatttatcatgcagtttaagtctcaagttgttttgctcaatttctgtctgaaaaattgatcttttgatgaatcagttatttaagccactcactattattttatctagatatatctgtctgtttgtgtccattagtgattgtcttatgatggagtataccaacatttgattcatatacatttatagttggtatattattgatagattctttgctttattaagtgtatctgccttcattatctcttctgcttaattttgcttgcagtctactttgtcaagtataatgatgactactctttgcctacttcctacttctgtttacttggtatgtagctttttatcctttgacttttggcctcagacaagtcctatggttttctcatatgaggcttctaacctttagtgttagtatgtaggcaactaaggttttgtgagtgtaggtaggcctagaccttgtaactagagaagagattgtaagaatggaatgaaaggtattgagaagaaccagtttgcaagcaaccttattgaggtgtgactttatgccagagaatgtactcatttggatgtaaaactcaatagtgtttgttatgtaacagagctgcgctgtcctgcttgggattttttttcaatttgacacaaactagagttatctgggaagaggaacatgaattgaggaaatgtccccattagattcctgtgggcgagcctgtaggaggcatcttcttaatcactgattgatgtgggaggatgcagctcattgtgggtggccccacagcaaactagtaagcagccctcttccaagacttctgtatcagtttctatcttgagttcctgttctgacttcccttcatggtaaattacatctataaattgaaataaaccctttcctccttaagttgcttttggtcattggtaccttcataacagcaatagaaaacataaggcaaggataattattatcacaatcctgattttaaaacatttctatgtcactccaaggatatcgatttgtgtccatttgcatttactctttatttctttttgcagctccaggcaactgctaacctttatattacgtagacttattaaaacaattttaatatgtatgtgtgcatatatgtacacatgccatgtttttttccatttttcttcataaagaatctcattatctgatcttaaatttgtggtcttctattccagtttcccaaatgccctctctctctctctctctctctctctctctctctctctctctctctctctcattagtgctcttaaaccccggatctcatatctcatgcattccagtcaaatgccctgccactgacttacatccagaaccccactgctcaattttcaagtctcttattaatgctctgtgacatatgttaaaaatatgtcctaccagatgggcgttggtggcacacgcctttaatcccagcactccagaggcagtggcaggtagatctctgtgagttcaaggccagcctggtctacagagagagttccaggacaacctctaaagctacagagaaaccctgtctcaaaaatcaaaaaaaatttcctaccagtttgtcatgtgtctgttcgtttcttcatggtatttattgttacataaaattttatgttagactacctagtctcatgattattttgagtttatatttatgacctttccagcttctgagtcctccaaaaggccaccaaaatagatgactaactcaacaaagcctagttcatatactgcacacaaataagggaggctgctgtgagcacataattttaataatgccttaaaatagggtgtcaagagcaggtgattcttaacatttaaggaatccagttttaaggttgggtcctacagtgtgcaatatggggttctgctagtggcagggcaaaactttagtttgggtacagtttaggattattgggctgaatcaaccttggaagataaactatcattttacaaaaccagttaaaggactgggaagattgttcaatcaagggcccaaggaaggagttgaatctccagaattcatgtaaaaaatttggatgtggtagtaggtgcttatatgtgaggggacgacatgcagatcctgggcttttgggctagccaacctagcgtaattggtaagctccaggacaatgagaaaagttgtgggtgtctggcttctgagctgcaatgcccaaggctgcccctgctgtccacatgcacacacatgcacacacacacacacacacacacacacacacacacacacacacacaggtgtgcgcatgcatgcaagccattgagtgaccaattgtctagaagggaatgcttactctgctaaggcctttctaagtacttttctgttcccaaatcagaaataatagtaagataatttgcgactttcttgggcagaaattgtttggaatgataaagtcaagctgtgatgtcttaggtagtctcagttctgtgtctttgtaagactcttttcacatcttatttcaagtcatcttactctgcattctctttccatgagtttcctgtaacagagtacagagaggatatgtaaacatacataagtgtatgaatatagatacataatttgaacattaaaaatgttttcctgtgctcttgtgtatcagtggtattctgaattttatatgggattcctagactattctctcaaatgtctataaatatttactattattattaagacagtgtcacatatatacagtatagcataaactagcctccagcttggtgtgtaatttaagctagcctcaaacgcaagatcctcttgcctcggcttcccaagtacagcaattacagatgtgcaccattgcacctggatcctgtagcttccaatgtggcatgttgaagtcttatgctaatgtaatgtttttaaactgtggccacaaattccctctcacatgttaattatgttatctttggactttcttctatcctctgcataaatttaaatttttccttacatccttctgggtttccccccatggtaattcttaaattttattatgtttttctttgtcttcatgtggggtgagcaagaatgtgtgtatgcatgttcaaatatgtgtgcatacacttatgtgtgcaggtacacatgcatgtggaagccgtgattgacagtggagccttcctccattactctccaccatggtgactgaggcagggttgctcagttcaatctagatttctctggtacagttggatagcttgctctggggaattctccctctctgcctttttagcactgaactcacaggcgggctcccaggtctgccagcactataggtgttcctgggaatcggaactccttttttcttgtcaacaagcccttcaaccacggacccataaccccagcccacagtttttcattttaaattgttactatgcagagctgatggtaaaacactagagggaagcacacactgtttatagcgactttgaaggaggtttgtagtcattgagttcttcatcaaaaagtttaagagataaacttcttatttttgaaactcagaaatcttacaggttataatttgctagctcactgggaatactttcatttgaaaacttcaagtctattaatgttcaagacatttttacttttgtcatctttcataagcaaagatttctataggaatccagacaggggtggggagagggaggaggaagagagagagacagagagaacactgggaagctggatcaatcggatcacaaatttgagatcttgtctgaaagtaaaaaaaacaagtcctagatgtcagcattcctatgaaattctatgcacataggttcttcttgatctaaccttcatgtttggtaacgtttcattcactatttttatttccttatattgtggctgtgtcttaaggtatttccttcattgatcttgcagataattgatttcccactctggttctttttacttcaccgtttctacttcattttaaatttgaaattatgttttacatttctgagattattttatgctgtccaactctatatacttgagcacttttcaattaacatgctctcctgtatcttatatcccttatcctcctgagtcatcacctggacacctgagagctccttttcaaattgttatgtccttctaaatggacacaagtcccgtcgttgttagagctatcagtgagaaatgaggttgaggtatcctccttgctgatactgaaggcaaatggttttcagcctgagaactcccaaatgaggcatgcctagggggtgtgttctgttttgctatttccctcagttaagtcaggtggggcaggattagtgagattgatctgcctctccctagcctaaagcagcaagcaggctgagtattctctctgtgtgaatctcccgctttggatcagttcagccaacatacttctgttttgggtaatctcatgatgtcaccccaggctcccctcagaccaggatatcctcagcaaagatgcctcacagctacagtgggacatgtcaagggttcagaacagtaccgtgcatataagaagtcagtacccatcaccactgtaaaatgtgttgtatgagccagagagaatatctacagaacacaaactggccttttcatcatattttatattcgtcactattttgaaagttagtctctttctccatttgtaagcatcctcaaatggatgctccatccagtaaatggtactttttaaaaatgtgggatgtttgtgtgctgtgtccagttagaaagaatcagggccttccaagcctcagaaaagagaaaattagatcctatcctaccaaatcatatgcttttgacacaagctagagtcatcagaggaaggagcctcagctgaggaaatgcatcaatgagatccaactgtaaggcattttctcaattagtgattaatggggcatggtccagcccatgttggatggtgctatccctaggctgtttggacatggattctataagaaggtgggttgagcaaaccatgggaaacaagctagtaagcagctcccctccatgacctctgcatcagttcctgcctacggaatcgtgccctgtttgagttcctgttctgacttcttcagtgataaacagcaatgctgaagtgtaagccaaataaaccctttcctccccaacttgccttttggtcatggtgttttgatacagccatagaaaccctaagacagtgtccttatagaaaagattcaagagagacaccttgtcccttctgccattcgatgctggagtagaaaaatagatgttaagaggaaggagaccctattagacaccaaatctgttcccattttgatcttagacttctcagctgtgagaaacaagtgtctattgtttacaggcagtggcctaaatagacaagaagacagctagggagattgctcgtaaaaattagcttccaatgaaaatgggagtataatccttgcagatgtgagtgtgctcttgtcagtgatggaagagagactaagccagcactgcccccggtatcctgaagagttcaccacttaactgtcttgcactcggataaagccatgccattgactacgtcacagaaaacaattttaggctgagttggagtgcagcaaagttagggggagttataaagtagagatagtacatgcttcatatttaagaatgggtatttacttcccaaggcaaaagtaatgggcattgagaaagggagacttaaaatatggtacccccaaagacacgagtgtagacttcccaaaagggagtcacatttggttgtctttactgtgtgtgtgtgtgtgtgtgtgtgtgtgtgtgtgtgtgtgtgtgtgtgtggtatttaaagattaagcaaaggtgaaaatctatgtaaagtttaataataaattaaaaatgtgtgagttagtttacttatctttaagagttttcctttagccaaattacaagttggttttatgaggtatattgtttatatttgggggtgagcaaagttgaaaatctatgtaaagtttaataatgaattaaaatgtgtgagttagtttacttatctttaagagttttcctttggtcaaattacaaggtggttttatgaggtatattgtttatatttaggggtgagagaggaatgctaatatagttaaattccaggtcacagacataccggctctcagtcagcatagtctatttgttctaagtacatagtttattttattttctaatactcttgtttgcagtatctacaggaaaatggagaccatgtatgcaggaaccctgggtttatcagctgtgttgaagcttcttatgttcagcaggaaacactaacaagattccagggtaaaaggtttcctttgcctctcacacatttaattcttcttttctctcattcttgctccctgatgagccattgttaaaggagactttctccatctatctatctcagtcccattgaacaggtttctctccatccactgggtccctgcagctgcttaatgaaataaccactctgaggcttaatatgtttatagtagtttagtcaatggcttaggcgtcttactggctagctctctcttaattgttaactcatttctattaatctgtgtatctccatgtggccttggcttaccggtggtgacaccctggcatcttgactccccgctggctacatggcatatcctcaactctgcctattacctctgtctatccctgtacagatttccagtctgactttactctgttaagctattggctgaaacagctttattcatcaactaacaatagaaacatagtcacagcatacagaagaacattcccccatcatctccctatttctgtctaaataaaaaagtgtttaactttatcatagtaaaattacaaattgggaaaaaattaaagttatttaaactttgcttgtcaccttcaattagtatgtccatactacataatataccatttgttaaacctgttgattactatggatagttgtgtatcttagaggtaaagtcttgcctaacatttgaaaggcaatgagttcaatgtaaaaaagttatacaacattaagctatacaaccattgaattttctagtattttttaagaagatgactatgaggcatagtccaacagacagaagaaagtcagaacaaccaagatgttcttgatcctaagacagaccaagaaaggcagcctctactgtaaaatgcaacctgaggatgatgggcagtgagctctggcagtgcagatgtatccctaagtcaactcctaacacacatgcatgcagcactggcatagtccctcatggagctcagtccaggtagagactcctttaagtggccaagtgtaccttgtcagttacgaattatacataagtacaaaggtctgagtcagcacacaaaaatccattcctccctcaccaagcgcaggctttataatctagtacagcctgaactcactctaagaaaaagtgcaaggatcagtttcctgacccattccgaatgcatttgaggcagtttttaggctagatagaggatgtgtgttggatacattgggtagattcccttggcaacttgcattgttcctctgtagcacttatcacaattagacattaaccaacctgagggtagaaaattcttactagtttcacatgttgctatattcaaaatgcctagaaccgtgcctggcacatgatcagacctcaatgaatatttgtcagtaagtgaacaagttggtagttgtgcatgtattgtatctcatcccttggactgtaaacacacgaggaggcctccgccatgtcgttcacccctgtgtcctatgcctaacagtctgccctgggtgttgtatacttttcagtagctagtacatggaattcaataaccacccattcaactaaggttcagataagaacaactgcatatttttattttccctgatgcgtgtgcagcttagtgatgcaacttgccttgcattctcaggacctttgattgatttcaggcatccacttctcccgcagaagaaaatgcctcttagaagaaaaactttgttagtagatgattaatgtgtcttcttaccttctaggtaaaaagatttttttcttattttaacaacgtgcatttaaaatatccagttcagtcttatctgtacagatgataatattttctctttttgatgatcacagaatatttaaaaatacacatacttgttttcttcttctaaatgtttgctgatgttttcctttttgtttttgcattgaactcagtgccttttacatgttaggcaaagcaccctgcctctgagatatggacccagtcttactgattaattttactgatggcttggactttataataaagatgagagttctggtgaggtattgctaatgcctctgagaataaagccgctttgaattacattaaaattcatttcatggaaaaatgaagtaatatggttgactagagaggaaggtaatttatcattttatttgcctggtgaataatccatgaccataacttttctaaaattaaatctgaacatatttcaatttggaacaccttagtgcttagtctcattgtgtgggtgagtccctttcatctactcagaattctaaaattacctccatcctttatcccaattgtttaacataccaatggcttattctgcctaacttagtttcataatccttctttcataaagaaatgttagtaaaaatgtgtatcataaatgtgagggagatggccttgtggttcatgcctgtaaagtacagtactcaagagaccgaggcagggaagtcactgagttcagtgccagcctgagctacatagcgagaccctatctcaaagcaaccataacaaaaaatgataaaaaatataagggcaaaggaaaatgttgacttttgtggggaacaaagtgctaagtgaatgcatattgttgacatgagcacagtgatgtttaggaccccaatgcctcagacccacaggaatgacaaagccttctggtccagggatgttatggtgtattgacatttagctaaaccagtgtatgcagaaactatcaaccacagcatgtgaagaccacagcctgaaactcttctcccacagagatctcctaccaagacaagcaaaccacatcctccctattcaactgtacataaaaaccacctcctggatcaaccatgtactgtaaacccacctcctggatcagcagtgtatataaacatgctaaattttcaggctgctggagtatctccatcagagagcaccaccacctgatctcagcatatatatatatatatatatatatatatatatatatatatatatatatatatgtccttcattcccttgtcacccaagtcaagtcagccccaaagtcaggcaggtcttggtaatgtccacacctctgcttcttctgcccagtactgggaattaacccaagacatcacacatgtcaagcaaacactgtaccactaggttgtatccctaggtcagtgggggaaaaagatttgaataaagagagatgcctttactagatggttaaatgatagagttatgaaagcatcctataatttagatttgttaaattttagcataacccaaacttattctgcatagataaagaggttggggtataatctgaatagctatcttctgggggtaagtataggtttatgtaattatagatgatgggcattgcagagcaagcatattaagaggggctggagagatggcccagtgctgaagggcacttgctgctcttttagaggacgagagtttgagtcctagcacctatttcaagcatctcacaatcacttgtaactccagctccaggagttctgacacccctgtctctgtagtcacctgcactcttgtgcacatactgccacccaccacaggcacataaaatatacataatttagtataataaactaaatttgaaagagttctctagagcagaaatactggaattatcttagggaaaagtgttggtggcatgaacctggttgagtggagcctaaaaatgaggcagtctaaagtctcacacaatagccaactttattcagagcatcagacaatttatactctgacctttaggagccacctgagtaaagtttacaatcacaaggacaagtctcatgtggcacagacatgtttttccacagggacatatgaataacaacagctgaagtaaactcagtcctatctgccacacctgggagaagtatgaaaacataatccaagaacaattctgtgttctgaagaaactgaggtcacagactcatatctgtttgcttggacgtttctcacaagcactcagaaactcatacaactccattcttggactgtgttccaacagaaaataagtagaatatggaatttatttatctactcatgcaatatatttttgaacatattctttcccctctccaaatcctcccatctcctccccatcttcctatccactcaacttattgttccctttctctctcctctctttcaaagcaaaataaggagaaaactcaatgagacaaaaggaaaccaaaaagaaagtccatgcacatatgcaatgtgctctgaacatgttccctgtcattcatcacatcctgcctcaccctgtcatttgtttcctttctccaagacattttcactgttactttcatgccatatatacatgaataattttatgtatctatataaaattaatgaaccaaaaatgagggaaaatgtgatatctgtccttctgatactgatttaattcatttagaatgattattaccagttgcatccatttaccagcaaatgatatacttttattcttctttcccagaggtaagcacacacggctatggacacctaatttttaaaaattatttattttgttttttgatattataattatacagtctcccttttcttccctccaaatgctccccctttctctctctcaaatcatggcatcttttttcattaattgttgttacatacatttatgtgtatgtatatacatatatattctgaaatacatagatacaagctgctctatctgtataacgttacctgtgtgtatgctttcaaagttgaccatttggtattttgaaaaagaatgattgtgctcttccctaggtaatactgtttaccctgctctcagcattctttaattgcctgtaattctttatgtggggttgaggtctcctgagttttccccacccactttatcatgtctggtgtccttgtttagctcatgtgtaggcagtcatgttggtaagacttatctcacagcaaactcttggatcttatggttcttaataaataatctttctgctcactcttccacaatgttccctgaaccttaggtgtgggagttatattacaggcatatctcttgggactcagctctacaactttcattttgattggttgtggttttctgcgacagtctctgttgcaaagagaactttccttcatgaggatgaggatggggcttatctgtgagtataaggacaattatttagaaggtagttacagattatgctggtttagctaaatgtcagttgcagatctcctagaaccctgactttattggccctgagtagatggctaggtttccactactgacatgatttccctttgctgtgtatatgcaccacattttcattatctatttgtagattgaagaacatttaggttgtttccatttcccatgtactgtgactagaacagcaatgaccatgactgaaaaagggattagtagctagaatatgcaaaacactgcagaaaaccccactaaatgcctctaaatcaagcagcctaataaatggctaatgatgaaatgaatatgtatttcttaaaagagaaagttctagtgaccaataaccgtccatagaatggcagtggagttttggtgaggatttcataaccaaggtgtttcaaagctggaccagcattgtcaagaagaacagaaaaattcgcaggcatgtggtgtttaatcttactgtgtgccttactggcaacatgacgagcacttctagggacctgagagtgctcattcttgaaagaaaaacataaacacaatgtaaaagttagttcctgcgttcatggggcacgtggtctgaataggatgcagacaggaaataatcccacaagtaattgcctccattgtggaaaattagatgcagaaataagacagtagaggagaaagagaagagcatgggagagagatggaggcagtggggaggagagagaagaaaagaaaattgatatgaaaacagatatttatgaagagaagcatcagagcctggcttgctggtccaaacctgtaactccagcactcaggaaacagaggcagaaggtgatgttccctaaatgtgttgtcactgtttcctcattaatcagttttaatgtctctactttttctgtagatatcaggtttactaagtagtctgtgaacttttttttaaagataaatgcttcattacagatttattatttatagtgtcctatcttcttgaaagaagatagttatcaggcaggaaattcaggacaacgggctgaaaaatattcacgaggactcatgaggaaaaccatcactccaattgtaaggtttccttacaagcacttaaacatagctgaggcaaccacatctgtgaaaccaacaaagcagcttccttggcttgatctgaccaatatttaccaccatttagttatgctctctgtaggcaggcactttactgtttgaagaaataattgtccataaagaaaaaatgattaattgtgatatggctttacttaaatctgttttgtagtcattgagcatttcacatgaataaattaatctttcatatatcatagtctatctcaaatagcttcccaaatatttaaaatggtaaaggactctattcatggcatacatatatgaaagagattttgttactatgtggcttattagcagaataaggaaattattctattaatcagacaaggagggtgcagggaaagcagctgtgattgttaaagagattaaagagaaagcttgggctctgcactgggacaataggaatagtgccctaaagactccaactgttgggagcatagcatgaaggtacttgcgcccacagatctccagagaaaccaggaatgttaagcatacaggattatctttccaatgggagagatgaaaaacctgttcttccatccagaaagctaagaattggaagtgattgacagcctggtgatctgtattatctgttgggccaggccacatcaagctcctataaccaggactggaggtgactagtaatctaaatgacccttacagacagagccttccccaagctcttccaagaaggaccagaggtggctaacagccacatgacctttatgctatctgtatgaccgagagcaggccagacccttaagctagcacagatagcctgtctctagacccgtcttcttggaagaaatgacatgtaccctgtgttgagtttcaatgtaattatgcttcctcatgcaacagggattgtgttacatcaagaaacttttgcctgttattagattctctgaagtcactctgcattgagtttcactcttatctcttcacaaggtttggtcctctgtataacacctgtgaacatgcaaattcatttcaaaagaaagagcctgacacctgcctacagaagtgtttccttggggtcaccctgggagtcctacagggaccagtgcaagtgtggtcaaaggggaccaggctgagagcagaacttggcagcatcattcacatggttctgattctatagacatgaggagtacaagggtgaggcttttgccaaggttcccaaagctggctaaagctaggacatgtggggcggggttggattcctggaaagaggttctgaggtcatttcacagcatggaaggtaaatcttctaaattgcagtgaagctcccaggatgctggagatgccagcactctaagatgtctgccaaagatagctgcatgatttaagaggactcagcccacaggacaggctagatgggcagcaggcatcagagatggatgggagaggcttcccacaccatttggatcctagctgacccaaggcacaaacctcaaatgctgaacacagctgcagcgcttggttctcaacctctgggcttccgtctggctttggtctgatctttccttgcaatgttctcattccccttttggaatgggaaagtgtactccatgccattgtatgatgtgagtatgcaactttctatttgatatcatagggctcacagctgtttacccaagtctctgaagatctctgcactgacagttttgaacaatgttggaactgttaaagactatgggggtgtttggagttgtcttgggggtgtttttgttacgagcttataaaaataaaagtggaaggttatggctttaaagtgatatgtttggttgtcaaattgaaaaggggagaacttgatgatgttaactgataaggtctagaatcatctaacaataagcttttgggcaaatgtgtgagggagtttctggattgctttgagtttagaagacccaccttaaatgtgagtgacacaattttatgagctggaatccccaactaagaaaaaaggagaaagtgtctgggcaccatcacttctctctttctctgcttcctgactgcagataccatgtgatcaaactcctgtcaccatgacatccctgctgtgaaaatgtaatcaattgctgcaccagagaagtctgtagcacctggtaagtagaactgtgagcctatgtaaactatgccttcctctaatgaggctaatccttcaattaagtggaaagagaagccgcccagtgctatgcgaactgctctcctcctcacttctgatctccacatgctctgaggaactagttcattctgtcctttattctagtggggcaggggtgatgttactatggtaaaaattctacagggccaatcaaccaactaaagtctgtgatatcggagagctagaatgttggagcagatcctgagccaaattatcgtgggctgtctttagccttctaaacagccatccatcatccactgcgtttgacctaaaatcaatccttataacaattagggaaattcttttggaatacacaatatagacacctctcttctaccaatccacaggctaataaatgccaccagatagtatctgcatcctataaaagaataccttaatgtataacttcctttgttctgttactataacaagtttcatgcaactcttaccagggtggaataggtgtttagagaaagccagattctgtttcccaggccatggtggctcccatctggcttcagagcaaacccttactccctttgagaggagagctgtggtttgcatccacacagtgtccaatacactggtacacttaaatggatttaagtttgctgctgaaggtctattgccaagggacattaagcttattccctgcccaagcactgtatataagttcagaattatttatcagagaagggggtgcatattgaaagagaccctgcaaggaaacctatttcaaccaagaaatgcattgattgtaattctcaggagtagaggataactaatgttgtggtttaaatgtaagtcccacagggttgcactttggaacacttgacccccggctgatgagctgtttgggaaggttgtggagcctttaggaggtggagcctcccttaaagaagacttcatggtcaagcctcccttcttatttgttttctgcagcctgcatgtggatataatgtgacaagccaacttcccaccccttccaccattcctgctaacaaccatcccacgtcttcctcgtgatgatggactgtatccctctgggcctgttagccaaaataaaccctttctttcttaaactgctatcttgtcttagggtttctgttgctttgataaaacacatgactgaaagcaacttggggaggaaagagtttatttcagcttacaactctcaggtcacactccatcactgagggagggcagggcaggaactgaagcagaggccatgaaggaacactgcttaggggcttgctcatcatgactcactcagcctgctttcttatcctgtctaggaccacctgctcagagggcagcactgccagcaatgggctgggccctcccacatcaatcattaatcaagaaaatgcttccagacttgcctacagctacatctttaaaggtatttccttaattaagagtccctcttcccaaatgacctagcttgtgtcaaattgacataaagttcgtcagtatggttggtcttgttaagatacttaagcacagcaacaagaaaataactgtaacatctgggttggtaaagtgctttccacgcaagcaaaagaaccatgttcaaatctcagagcccaaagacagacatagtatgtggacttgcaattccagtgctggggacacggagatagacagacctctggggatcactggctagccagactaacctaacctgcacttgagagatcctgtctcaaaaaaccaaagtgagtgatgtctgtggaggaatgacacttgggattttcctctgtcccctatacatgtgcatatacacctcccccacttgaaaaccaaacacaaatatacaaaacaacattaattaattaatcttcataaacaaatgaaatccttgatgcaaacattccttttcctttccaaagctctaccatccagtgaccaaagagctgaattgaacaaattgttgaagaggaaatgaaaacgaaaggagagagttggagaggcagttcctccatgatgccagaagcccaggcgagatgctgtttaccagagatattaacatttcatattttttagatttttatttatttattatgtatacaccattctgcttccatgtatatctgcactccagaagagggcatcggatctcataacggatggttgtgagccaccatgtagtttctgggaattgaactcaggacctctggaagagcagtcagtgctctcaacctcttgagtcatctctccaggtccaacatttcacattcttaatcaatgtgcccctcaagcaactcttgagccaagcagtgtgattatccaagctggaactaagggagcaggggtagttatgccaactgatatccaagcttccttagtaatcaaatagcatggccagcatcatgttgattggtcctgccaacaaggctggctcttgcagtcagcagggagtaccaccttctggttctcaagctcacctcaaaagaggccacctgtcttctggggagcttgagaaagcctgtgagttacctgctatcaaaggctaggaagggataaaaattatctgggaataaataaactattgattgacaacacgggtccatctcagaaacactgggcagagtgaaagagaggagacatgcaagatctcaggcacaaagcctaaatggagatcagtagaaacaaaccggatgatagccagtggttatgtacggtaacaggctctatggtactgactgcagaagggcaagccaggcctttgtgttgctatggaaatatcaaaactcatgaaatgatgcattaaagtgggcaaattttatgtgtctaaattatggttctgtaaaccttaaataaaatttacccttccatcaaatttccttgaagaaatgttgcctttaaattttgcatttaactgactcacattgtctattttaataaagaagaatgtccctatggagattatttataattagagaatttcaataatacgcctgagaacaatttagagtaagaagagatcaagtgaaagcaagagtgaattctaccagcccataaacaactataactttcttctgccccctagtggtagaaactcacaatttcagtacattggttcattcaccagtgaccagctttaggagactgcgttttgtagaccaaagaaggtcatgtgttggcaaatcatctggttcactgtaaggactcttctgtatgacaaactgatcagaaagcaggagagagcgttgcaaaagatagaccaggtcctcgccttcatcgtgctcaccttctagtctcagacggtcaaaagtaaacagccaaattaacaaaagcattcccaagcacgataagaaattaatgaatggaacaactgatagcttgtttgaggctatggaagttaaggaagaaataaggagtccagaaaagggaaggtatgcacatcagaagatccttccagataaagggattggcaggttgaacatccataagatggaatggaaacaccgagtggggagacttgtgacaagcagggttcagaggagaaagactcaggattccgaagaggagtttattccaatttaggagaaagtcactgaagaattccctgtttcagtatatcctctaaaatgaaactttctggggccagtgaaatggctccatggcaggtaaaggcaccttacctcactacctgagtttgatccccagaacatgtgatggaaagagagtacaaactgagtcccacaaattgtcctctgacctctgcaagtgtgctctggcacatgcatgcctgctcatattcacacacacacacacacacacacacacacacacacacacacacacactccacaaattatatatggtaaaaactaataaaaagcaaaacttcaatgagagaatctacattttattttcttaaacatctgtgaagttgctcagatcctaaatctaggaaggctttgtgttttacaacttatcttctgtctgcatggaagtacagcaaaataatcacaataagctatttatagccttgtttatttggtttaattagtgaaagcattgttgactcaacaataaaatccatgtcttgacgtttcttggatgtattgactcttgccagttcttcagtcccttcacgatttcctctctcttgtctctttcagtttcttatctaaaatgttccaaaacaattattgcaaaagttggagagacgtgaagaacctttttgttggaaagaaatgagccttccagactcactctcagcccattcttggaacagctggagtgtggagggggaatgggtgtctgaacatgccttggtgcttagggatccagaacagatgttgcattccataagtttccccaatctattatccatgatagctctgtctcttcgaggcagtgatgcttcggggaaaggctgatccattttatccagcaagctgatgcgcagaaacgggctgttgagtcagcttcaattcatctcagatgagaagtttataaatgctgtttgtgtattttcatacaaggctatcaagttcaatatacctagcaaaaactatctccttggcccatgagatttccctacctggaatgctttgagtttgtgtgcacccagcctatgaggcatggctcacatcttctatgtagtgtcccttgatcagtcccatttggtatggaatctctctttcttcaaacatctgagcagcacctactggtatcatcatttgccttgccatcatgagcaactgttgagcaccattgtcatatgaatgtcacctctcccaggctcacattcactgagggcagagaagtacttaggagtctctactaatcctctagaggtgagggtatggcccttcacagtttacgcttccagaatattgccaagatgattcatagaatagcctgactcctttgggagctctgcttgtttttgtgatggggccagggaaaaggcatcagagaataaaaaaaggagaatgaaccctaaatcaagaagacaggtatgaatcaagttggggtgaaagggaaaaacacttgaagcagacagtcctcaggtctggggctctgtcttggcctgtcctggccttgtcctgtcttggcccaaccccacttcccttctgtcccactgatcatcctcgagccagcccagcgcatctcttctgaaagcacagtctaagaatgaattcccagtgagcagcctggtgacagcgtttctaagtacttggagtcaggctcggtgacactgctctctgtctactgtcttactgagtgcacccttgggtctcactggagccagagtggctccagatcatcagctttatgagagatgacgactatagccaggaaccaaatgccttgtattgccagcctttttgaaatcagatgacaggccccattcaagatggaggacagactctggcctttgggtaaggcatgtcttgcccaaagcatgctaaagacctgtagggggcgatattgtcacacaccatatgtttctctacatgtatttcaaggcttggctctaaacttgccaaatcaaaatgcatttgtagttttcaaataatttacacgatgttaagttgtttaaaaggttaaagaaattgggaggggtgatatgaaaatactcaaggaagtgattgccatacgatgtaaaaaacaggctgctattcagtgtaatctttagaccattcttctctttccctccatttttcattttattgaaaatagatgcttttctcatatactatatcctgactgtagtttcccctccctctattcattccagctactctccacctcccctccctccagatccactccctttctgactctgatttgaaaagaacaggcttctaacaaataacaacccaacatgacaaaagaaaagatagtaagataaggcaaaaaccatcgtactgaagtcggacacagcatcccaataagagggaaagagtcctaagagcaggtacaagaatcagagacccactcatctcacactcaggggtcccataaaaacactaagctgaaagctgtggtgtgtatgcagaggacctggtacagacccaggtaggccctgtgtttgctgtgtcagtctctgtgggttcatgtgcaccttgttgagttgattcacaaggccttgctctcctggtgttctccatctcctctggctctgatattctttctgcctcctcctcctcttcctcaggtttccctgagctctgaggggagggatttgatagaaacctgtcattgagactctgagtaacatctatagtcaaactttcttgtcccaacagcccccagtaatgacacagagacttattattaattatgaagcttggcctttagcttcggcttgttcccaatagctcttataactgaaattagcctgattttattaatctatgttctgtcacatggattattaactttcctccataaaatatgtctgcctctctgtgtgtctcactggtgtctccttcacatgcctaggttcatctggagttcctctctttccctggaagtcctgttcattctctcctgcctaaattggtcatttagctctttattaagccaatcacaagaatacatcttcacacagtgtaaacaaataccctgaaacaaatatctggctgtgggtctctgcatctgtttccatctgctgatggaggaaacttctctgatgatgactgaataagacactaatctatgagtacagcagaatattaatatgagtaattttattgatatttttttctttttagaccaatagtgcttgggtatacctaggtctctgagctctctagtttctggttcttggttaccctgtcagtgtcaggtatgggttctgtctcatggagtgggctgtaagtcaaatcagttaacaactccccccaagtgctgtgccaccattgccctagcatattttgcaggcaggacagattgtaggtcaaaggttttgtggttgggttggtgtttgtgtttttcttttggtatcctgctgagtacttcctgcagcaaagacatagaacttaggggtgaaggctccatggaggcaccagctcaacttctccatgttcagtgagttgtgtgtgtgttatcctcagcattagggccctgctgttagtttgcagagagaaacccattgttttaacaacagcctaggttttatgaagattcccatgagacccctttggctaccaattcaattgaatgcaacctagtctggctcctggaagcctcatttggtgacaagagatggccagttgagactccgtatcccccattattgggagacctcattaggatcaccttcatacagtttaggaagtttctactgcactggtttccacatcatcccagaaatgccctgttgttccagctctctttccctgcattcttgccctctacctttctctcctctgtctccccacgtgttcttcccactcctgttcccatgcacccccaacccacctataaaatctattctatttttccccctccaagagagatccatgttttattggattatttggggtttttttgatatctctttctttgagtctttacatattttggagattagctctctgtcagctgtgaacttggtaaagatctttttcccattctgtaggctgccacattgcccagttgatgttgtcctttgccttaaggaagcttctcagtttcagaggtctcttttattaactgttgatcttattgactgtgttaatggtattctgttcggaaaatctcctgtgccatttgagttcaaggctattcccactttttcttctatcaggttcagtgtatctagttttgtgctgaggtctttgatatacttgggcttgagttttgcaaaatgataagtctggatttatttgcattcttctatatgccaacatccagttaagaccagcataatttgttgaagatgctttcttttttttcccagtgtatatttctggctcctatgtcagaaaccgagtgtacatatgtgtatggatttatgtctgagtctttgattcaattccacttatcagcatgtctgtttttatgccaataccatgcaattttttattactatagctctaaagtacaacttgaaatcaggtatggtgacatctccacagttcttttattgtacaggattgtttaagctattctaggttttttgtttttccatacaaaattgagtattgttctttcaatgtctgtcaagaattgtgttgggattttaatggagtttgcactgaatctgcagattgcttttggtaggatggccatttttactatgttaattctcccaatccatgagcatgggaaatctttccatctttggatatcttttccgatttctttcctcaaagacttaaagtttttgtacataggagggttattgatttttgtgcattgttttttgtatctagtcacttttgttgaaagtgtttatcagctctatgggctccctagtggaagttttagggtcacttatatatactatcatatcatctgcaaacaatgatactggcttcttcctttctaatttgtatctctttgatctccttcagttgtcatattattctagcaaagacttcaagtactgtattgaatagatagggagagagtggaaaaccttgtcttgttcttgattttaatggaattgcttttgaatttctctccatttaatttcatgttggctacagacttgctataaattacctttattatgttgaggtaagtcccttatatcctgaatctctccaggacttcatcatgaaggggtgttggattttgctaaaggtcttttctgcatttaataagattatcatgttttttttctttcagtttgtttatatggtgggttacatttattgatttttcatataccgaaccatctcttcgtctctgggatgaagccaacctgatcatggtggatgatctttttttttttttatgtgtttttggatttgtttcgcaagtattttattgagtattaactgtgtctatgttcataagagaatttggcctgcaattctctttcgttgttgggcctttatgtggtttgggtttcagggtaactattgcctcatagtatgaactgtgcagtgttccttatgtttctattttgtgggataatttgaggattactggcattaactcttctgtgaaagtctggtagaatgaattgctaaaaccatctggccctgggcttttgttggttgggggactttttttaaaagcttcttttttattttttctctgtgtctttctcatcatgcacccggatccacccatctcctattccctcacatctgcctctgcccctacaaccttccccaaacccccaaaatgaaacaaaataaaatttaagataaaaacagaaaacaaaggctaaagggggaaatctcatcatggaagctgcagcatgacacagtgagtcacgcagtaaacccctttactcatacattttacatgcaggtgttcattgcaaagaatcattggtttggttcggtgcccctggtctctgttacactattgatactgggccctcactggaactcttcctggacatcttgctgttgtccagtgttgtggagatcaggtagtcctgggtccacagaactgcatttaggagacttttaatgactgcttctaaggattataggtctgtttaagttgttatatggtcttgatttaataaaagaaaaaattatccatttcttttagatcttctgattttggggagtacaggtttttaaaatgtgtccttatgattctccatattttattggtgtcttgttatgtcattctttccatttctgattttgctaatttggatattctctctctgccttttagttagtttggataagggtttgtttatcttgttgattttctcaaagaaccacctcttttttttcttattgattctttgtattgttctctgtttctattttattgatttcatccctgactttatttcttgccatctattccccttgggtgtgattacttctttttgttctagagttccaggtatgttgttaagctgctaatatgaaatctctccatttttttccatgtaggcacttactgctatgaacttgcttattagaaccaatttcattgtgctcagtaagtttgggtatgctgtatattcaatttcactgaattctagaaggtctttaatgtctttctttgttcctatctttattcatttttcattcagtaaagttgtttagtttccataagtttgtaagctttctattgatatttaggtttaatccatagtggtatgataatatgcagggaattatttcaattttcttgtatctgataagacttgctttgtgtctgaatatgtgaccaattttggagcacgctcgatgaggtgcgcagaaggtatattcttttaagcttgggtgaaatgttctacaaatatctttaaggtccatttggtttataaaatcttttaggtacagtatttatctgtttagtttttgtctggatgacctacttgtctattggtgagagtggagcattgaagtctcccactaccaatgggtgagggtcaatatgtgatttagtaatgtttctttaacagattttggtgcccttgtgtttggggacatagatgttaagaattaaaatgccatcttggatttttcctttggtgagtatgtagtgtccttctctatcccttttgattagtttaggtttgaagtctactttgttagatattgaaataactacattaacttgcttctcaggtcatttgcttagaatatcatttcccagaggtaatgttgaggtgtgtttcttggatacagcagaaggataggtcatgttttctcttccatcctattagcctgtatctttttgttgagaaattgaaatcattaacagataccaatggccaatgattattgattcctatttttgttgttgttgatggtggtggtagtgtatgtaagtttcccttcttttgattttgctagtttgaggttatttattccctgtgtttttactggtgtagttaacctccttaggttggagttttgcttctagcaccttttgtagggctagattcatagatagatattgtttaaatttggctttatcatagaacatgttattttcttcatgtacagtaattgaaagttttgctgggtatagtattctgggctggcattcatggtctcttagaatctgcagtgcatgtgtctaggccctttgggcttttagagtctcctttgagaagtcagttgcaattctgatcatgctgcctttatatgttacttggtcttttccccttgcagctttaaatattctttctgtgttctgtatgtttagtgttttgatgattatgtgctgaggagattttcttttctggtgcagtctgtttggtgttctataaacttcttgtacccttacaggcatctctttctttaggtcaggaaaattcttttctataattttgttgaaagtattttctgggcctttaagttgtagtttttccttttcgtagcctattattcttaggtttggtcttttcatagtgttccagatttcatgattgttttgtgttagtttttgtttagatttaatattttctttgagtggtgttatctatttcttctagcttatcttcaacacctggcctgcaattttctcttcttctcttgtactctattggtgaagcttacctctgtagttgctttttaaattcctaaaattttcatttccaggattctctcagtttgtgttttctttattgattctatttccatttccaggtcttgaacagttttattcatttcttcccactgcttatttgtgttttataggatttctttaaggaatttatttatctccaattgtttgtatcttcctggatttcttcaaagaatttagtcatttcctccaattatttgtttgtgttttcctgtatttcttaaagggattcatctatttcctctttaaggacctctatcatcttaatacgggtgattttaaagtctttttcttgtgttttcagctatgttggaatattcagggcctgatgtggtagggtagttggactctggtggagacatcgtcctgcctgttatttcttgtgcttttatgctagcatctaggtgtctaggtttggggtgactataggtctaggtgatagtttctagacttgtctttttttgggtagggttttttttttcctgattaatgtttcctttctggattttcagagagtgtgatggctgtgtgttgcctgttttcctggtctgctcagctggtgtgttcacagggaacttgggttagcagaggtgccttggaggctgggataatgagacgaatataggataggaaggttgaggaagatctttgtgatccatgaggggtgggatcagagaggaaagggagactgcagcaggtttcctgttacagagctgcggatgagactggggagtaaatctcaggaggagaaggagaagtgtggctagttcatttcttttcttttttttttttttttgttttgtttttgtttttcagacagggtttctctgtgtagctttggagcctatcctggcactcgctctggagatcaggctggcctcgaactcacagagatccgcctgcctctgtctcccgagtgctgggattaaaggcgtgtgccaccaacgcccggctcatttcttaatgtttaaaaaaaaaaaatcaaagtccaaacttacatgccttttgctgtgaggctagagaactatggctcttaattttaatgttgtatgcttaaattagcataagaattgagcactgatttttaaacttctaaaagcatttcagtagcagtcagtgtcttgggtttttagcataaacaagaattgcctctttctgctattgtacagaactaccaactcactaaagagagagagagatgcctttcagaagaacatactccggggaaatagtacaataagtgaaaagatagcattgttgatttggatatagttggtcctgagtctttacagcagagctatttcacatttgccaaatctccttttcctgtcctgtgccaggttccctggtgacgaagggacatatagagatatcacatgagtggccaggtaagatacaggttaaatgtggtggtttgaaagaaaatgtcctccataggctcatagggagcggcactattaggaggtatggccttgttggaattaagtgtgtcactgggggtaggctttgaggttttggatactcaagccaggcctaggggctcactgtctcttcctgctgcctgtggatccagatgtagagccctcagctacctctctagcaccatatctgcctgtatgccaccatgcttcttgctgtaatgataatggactaaacctctaaactgtaagccaaacatggtttcttttatttttagtttttcgagacagggtttttttttttttttttttttttggctttggaaactgtcctggaactagatcttgttgaccaggctggtctcaagcttgcagagatccacctgcttgtatctcccgggtgctaggattaaaggtgtgcaccaccactgcccagccatgttttcttttataagagttgctgtggtcatggtgtttcttcatagcaatagaaacctgactaagacagaagtgtagataaccaactcatgccagactcttagatagaaagtggatccatcaagagaaaacttgcttcattcactaaatatttatgagtatcctgtacttaacaagcatggcactaagcatgtgaaggagaactacatagttaaaattcttgctcccatgaagtttacatgatgggtggggtaagaaacagatgtttaaaaatgagaaaggggtggcagtgatgtatacctgtagtctcaggtatgagggaagctgaggtacaactccttaagccttgctagttcaatttgagcctggtcaacatagagaggtcccatctcaaaacaaacaagagcaatgttctctaaagagtttaaataggacagaactgccctagatctgagactgtgcgggccttgtgtggagaggggttattgaagttgagatctgaataacagacaaggagctagccttgagaggtgaggcagagggagcctccccagaaattcaaatgccagaacaaaccaaagaggttaggggaaacacagagcctggtggctggaatgtcgtagctggagggttatctggtaggagaagagtagagataaagtcagaagaacgagtgagcacctggtcaagtgacaatcttgcagacaaactcaaggaacttgggttttatttcattatggtgaaagactgagaggatttcacagaggaatggaatgactggacagagatttcaaaaccaccctgattgcctttgtggggcaaacatgggagcctggagaccagatgagaattaatcaggagaaggaagccaattgtggtgaggtctggaccaggattgctgccctgaggaggaaggaggacagagttgtgaaatttcacagatggagctgttgattttgacggatttattggctgtacgtggtgacaatggagcaaaggaagactcatagcttttctctttgagcagccaaggcatgagatgggaagactgaggagattgtgttccaggggacaatttttggcattcaatgaataaggccactggacaagtatttgtgtgacttcaggctgtctctcttcagcttctagtgggagggtgttgtcaagccaacaggcattgctctgagtgagctagcctactctaaagtccagttatccaagagaaactcaacaatgggttttgggtctatagcaacaatctatcacaacaaataaatctatacaggaacattcagaaagactagcttctcaaactgcttctattccaattagattgctgttactcattggacttccaactcttcccagagttcgtagatatttttaaaaaattatttagaattattgttgatatttattcacataaattgaaaacaaggacgtataacagatcccaaatatccatgttagtgttccagcatccttttatataaataaaagaagcttagggtcttcataaagagatatataagtacatacatagatgtacaaatcacaagtcagagataaggttgaaaaagtggcaaagctgtaggtggtttgagaaaacacagaactttcagccccaccccaccaccatctttgttgctgctctagttggtggtgtgaagctgggagagcaagcttaaaagtgaggcagactaaagtctcattcaagagccaacttgattcagagattcagacaattattctccgagagttaagaagtgtcacatgcataaggtgttcagtcacaaggacaagacacatgtggtaaaaacaggtttttccatagaggcatacgagtaacaacagctgtggtgaactcactgctatctgctacacctgggaggagcatgcaaacacattgtaagaaggattccgtgctttgaagaaactgaggttccaagactcttgccttgttcttgcaagcactcagaattctcacacacctccattcttagactgtgttctgacacatcttaaaccataaatacatgtttttgtctgcaaggaatcatggagttggcctaatctagctgccttgagaggtatctgtcatgggtttttcaggttagagtctgtggcacctggggtactgagtgcctttcagtttctgagaaattgaggcactcccttgggcagtgaagcattcaggccaccttgtgactctctgtgttccctagaagtcaatgaagtgtatggaaacttggctggacaattgctcttagacattaatattgtgtaccttgtatagattgcttgctttggcaactaccattgtattgatcctggcaattgccattatattatatttctggaaaaggtaaaaaagctctgatagcttgcaataaacttgtcacagcctcagccttgctttgacctctccaaattgtgccttgtcaaaggttcatttctagttggccatatcaggtaaactttgcccagtaagtaagtactggaatttacatttgcctttgtcttcaagcctggagaattttgaagtcatacatttgttcatacagaggtcctaggtcattacaacctttgacctcacccacctccttgtcatcactgggagtgttttgttagccattaagtggactaacaaaggctatcacagccttggtctctttttcagtaattagagctctccatcttagcaagttctttgtgtgttggtgcctccagggagagagtcacattccctggagaatgcaggatccccagctatacccctgacaaggtagcagggtcctgaacctcacaaccctgctcctactcctccaaggcaaacacccaggcagagccagtccaggcatcacccttacttactgtttcccccagggttgcctctctaacatgtcacaaagattaaagagcatagcagagtgaccgagtgggatattccatttggagtacagttaggccaaggaaagccctgttgcagaatacacattattatagaacaaaactttagaaaatgatccaagataacccaaattatactggtttcctggccctccactaaccaaccgtgccttactactctctctctgctatcacttctcaccaggctctcactaagcttgctgcagccatctctcctccttttgtctcaaagcagacatacttctgccttgtggccttctctctttagggcctctgtctagagcagtccttcctttacttccttcaagtcctgactccatgtcacttttggagatcacacagtggtgacaaggtggagagaatggacaggtgaagcatgaggaaaatcattcaatgttttgggggtctgtttgtttggtacatcattgcatctgaatacaattgtcatccatagcatttttagttcttcagttgtaaggagatggggatattataatgtcaaattagaaaagctgtttgtaaaatatgctggtatgttctttagcgtatgaaataacatattggacatggcttacatatgttcttgagtaaagcagatgaaatcaacagtggaggcaaacctaaaggcagataaccaccattgtttcctggtggtgcgattaccagcagtttctattttcccctttatgtttttgcactttccaattttcaacgatgtccatatatcattttttctagaaaaacattattgtaaaacaaaaagaataaatgtgctccttttcagtcacatttctgaatcataatgctaaatgcaatctggctgattctctgtcatccatcacgctgtggcaaccacagacacagccccaggactgcacattctatttctaaacactgatgactctgagcccagccagtattttcagatggggctgaagcaggaggttggctcaatagaatggatgccagaatctcagtgcttcatagtaatggaaatgactttttttatattgattgccttggagacagattcctaggacttggcttgtactatttccaagaaagatgtatgaatttcttattgatggtctcaactccttgcaaagcatgcttaggaaaaaatatttctttttggtaatcaaaagaaaggcatgttataaagttctttcttggtcttgaggacaatagggagagatttcacataatggagagtctttttgaaataaagattattatatttatatttgtgtgtgtgtgtgtgtgtgtgtgtgtgtgtgtgtgtgtgtgtgtgtgtgtgttgtgagtgggtctgctacagcacacatgtggaggtcagaggagaacttaccaatagataatatgaattacactcaccatttatgcatataaatggtcagcccttgtatctgtgggatttgcatccatagagccaaccaactataaatgaaaatacattcttggttagggtttctattgctgtgaagagacaccatgaccacttgtaaaggagacttataaaggaaaacatttaattggagcaggtttacagttcagaggtttaatccattatcatcataatgggtagcatataggtagacatggtgctggaaaaggagttgagagttttacatcttgatccatagacaacaggaagaaactggcacattgggtgtgatttgagcatatatgacacttcaaagcccacctccacagtgacactcttcctccaataaggccacacctactccaacaaggctgcacctcctaatagtggaccaaacattcaaacacatgagtccattgaaaccaccacatccatttttcttttttttttttttattagttcaaattaggaacaagcttgcttcacatgtcaatcgcttctccctttccctcccctcacccccatcccaccctcctgcccccgacttaccctccaccctattcatcctccactccccaggaagggtagggcccttgatgggggctccccagaaccataccatcatcctgggccgggcctaggccctcccccatgtgttcaggatgagagagcatcccttcacatgggatgggctctcgaagtcccttcttacaccagggaaaaatactaatccactaccaggggctccctagagtgcagaggcctcctcattgatatccatgttcagaggtctcgatcagtcctgtgctggcctcccagacagcatctggggtccatgtgctcccccttgtacaggccagttgtttgtgtgggattcaccagcctggtactgacccctttgatcttcattcctccctctctgcaactaagttctagagttcagttcagtgtatatctgtgggtgtctgcctctgcatccatcagccactggatgagggctctaggatggcatataaagtagtcatcagtctcattgttggagaagagcatttaggttatcctctccaccaagacctagattgtcagtttgtgtcatccttgtaggtctctggaaatctccctagtgccagatttctcctcggacctataatggctccctctaatatggtatctttcatcctgctttcctctattcttccccaactcaatagttctactcttccatttcttcctctcctctcctcttctcctcctctcattctggcagctccctctcccctatcctcaagctcccaattagctcaggagttcatgccccttcccattcctggggtccatgcatttttcccttagagtcctttttgtttcctagttcctttggtgatgattgtaggctgttaatcctttgctctatgtctaaaattcatatatgagagagtacataccatgtttgtctttttgtgactgggttgcctcactcaggatggtttcttctagttccatccatttgcctgcgaatttcaagattccactgtttttttctgctgagtagtactccattgtataaatgtaccacattttctctatccattcttcagctgaggggcatctaggttgcttccaggtcctggctattacaaacaatgctgctaatgaacatggttgaacatatgtccttgttgtatggaagtgcattatttgggtatatgcccaagagaggaattgctgaatcttgaggtaaactgattcccatttttctgagcaaccaccatactgattttcaaagtggtcttacaagtttgcactcccaccagcaatggaggagtgttcctttttctccacatcctctacagcatagattgtcattggtgtttttgagtttaaccattctggccggtgtaaaatggtatctcagagttgttttgagttgcatttctctcatggccaaggactttgagcactttcttaagtgtctttcagctatttcagaatcctctgttgagaattctctatttagttctgcaccccacttttaatttcattgtttggtgttttggtggctagcttcttgagttcattgtctgttttggaaatcagccctctgtcagatgtggggttggtgaagatccttttccattctgtgggcagtcttttgtcttactgactgtgtcctttcccttacagaagcttctcagtttcaggaggtcccatttattaattgcagatctcaatgtctgtgctactggtgtaatgttcaggaagcggtctcctgtgccaattccttcaagggtatctcccacttcctcttctagaagattcagtgtggctggatttatgttgagatctttgatccatttgcacttaagttttgtgcatggtgacagatatggatctatctgcaatcctctgcatgtccgaatccagttgtgccagcaccatttcttgaagatgctatcttccttccactgtatagatttagcatctttgtcaaaaataagttattcataggtgtgtgggttaatatcagggttttcaatttgattctattggtctatctgtctatttttgttttcagaactatgattctataatagagcttgaaatcagggatggtgatgcctccacaagatcctttattgcacagagttgttttggctatcctgggttttttgtttttctatataaggttgagtattattctttcaatgtctgtgaaaaactttgttgggattttgatggggtttgcgttgaatctatagattgcttttggcaagattgccatttttactatgttgattctacctatccaagtgcatgggagatctttccattttctggtatcttctttaatttcttttttaaagactcaaagttcttactgtacaggtctttcacatttttggttagtgttaccccaaggtattttatgttgcttgtggatattgtgaaggatgatgtttctctgatttctttctcattggatttatcatctgtatatagaagggctactgatttttttgagttaattttgtatcctgctactttgctgaaggtgtttatcagctgtaggagtttgctggtagagttttttgggccacgtatgtagactatcatatcatcttcaaatagtgaaagtttgacttcttcctttccaatttgtgtccctttgatctccttttgatgtcttattgctctagctagaacttcaagtacaacattgaagatatatggagagagtggacagccttgtcttgttcctgattttagagcaatcgccttgagtttctctccatttagtttcatgctggctgttggtttggtgtatattgcttttatcatgttcagatatgttcctgttattcctgttctctccgagatctttatcatgaagggatgttggattttgtcaaaggctttttcagcatctagtgagatgatcatgtggtgtttctcttttagtttgtttatatggtggattacattgatggatttccttgcacccctgggatgaagcctacttgatcatagtggatgatttttctgatgtgttattggattcaattcgccaatattttgttgagtatttttgtatcgatgttcatgagggatattggtctgtagttctcttttttagttgtgtctgtgtgtggcttgggtatccaagtgattgtagcctcgtaaaaagagtttggcaatgtcccttctgcttctattttgtggaacaatttgaggagtactggtattagctcttgtttgaatttctgctagaattctgctgaagccatctggccctgggctttttttggttggaaggcttttgatgactgcttctatttcattaggggttaaaggtcgatttaaactgcttatctgctcttggtttaattttggtaagtgatatctatctagaaaattgtccatttcctttagattttcgaattttgtggagtacaggttttcaaagtatgacctgaagattctctggatttcctcagtgtccgttgttacatcccctttcatttctgattttgttaattagcatgctttttctctgcattttgattagtttggatagaggtttgtctgtcttgctgatctcctcaaagaaccaactctgtttcactgattctttgtaatgttttgctagtttctactttattgatttcagccctcagtttgattatttcctggaatagaatcaaatagaatatttgattctattcctctatggtgagtttgcttctttttgctctaaagctttcatttgttctgtcaattctctagtgtgacttttctccagtttcttcatgtgggcacttagtgctatgaactttccccttagcacctctttcagagtgtcccataattttgggtatgttgtgtctacattctcattaaattctaggaagtctttaatttctttcttttttttatttcttcctcaacccaggaatggtgcaattgggtgttattaaatttccacaagtttgtaggttttctgcaatttgtattgctgttgaattctaactttaaagcatggtgatctgataagatacagggggttatttcaattcttttgtatctgtggaggtttgctttgttgccaactatgtggtcaattttaaagaaggttccgtggcactgagaagaaggtatattcttttgtgtttggatggatggaatgttctatagatattttaatccaccaagctatcttcctattctatttacatgtatgtgtgtatggggggctatattaacatgtgtgtggatgcccatggaggtcagaagagggtgtcaaatcgcctggagctggaataacaggcagttgtgagccttctgacgtgggtgctgggaatcaaacttggatcctttgaatttaggttctctggaagagcaacaagtactcttagccactcatccatctccccagccactgggttctgtatttttgacatcttgattaccatatgctatgggtaggttattctctggtcatatgtatctactggtctaaatgcctcttgtgtctggagttttatttctttctctggatttggaaaattctcagctataattttattgaacaaattgtctttaaaccttcagacttattttttattttatgccttgtgtactcttgttttattactttttatcatttattttattagtttaaattaggaacaagcttgcttcagatgtcaatcccttctcccttctccctctccctcccctccccccaacatcccatctgcccctagccatcccccctctatactccagacagggtaaggccctcaaaaggggctccccaagtttaccacatcatcctgggccaggcctaggccctaccccatgtgtccaggtcaagagagcatcccttcacaagggatgggctctcaaactcccctttttttttttttttaagaccttacatgagatggaaacaaattaggtttctgctccttaggagcaaagctaccttgatgaagatgaaacactcctttattttttgataagggtctcatgtagcccaggctgaccccaaacttgataaatagctgagaatcttgaattagtgatcttcttgcctttacctcttaagtcctgtgactataagcttgtgccaccatgcctggctaaaagatactttaacaccattcctatatacacataatcctgaactctgtagaaggtggggatgaggtatgtccgtattctactatggaattgagagtggtcctaggactgacaccagtgcatattaaaccaggccccaagttctccgtggcatggcttagttctttgtttgtataattcacctgcaaaaattactccattctcatattcattggcaaacaccaacatttcaatgactcttatgttttaaaatgggaatgaggacagctattgtacgtcttcagtttgtcagggctaggtggatttaatcaagtggcatccaagtaaagagcggtccttattttttaaacccaaaggcagtcggtaacgtgacccaggcactttgacattatcatggtacatagaatataaaatattaatcctgcatagcatttaactcatttcaatcatacctgtctgtgatggcataataaattaacaagaagcctgccaacaactacctattaactatccttaatttttttatgtactcagaaaacttgaaaactgtctgtaaatcagtaaagctactcacgtattatttctgccaccaacaaaagaaatgccactgtaacagatgctgggtgatttttttttatgcaaagctgacactagtgacaggtttcaaagcatacaatttttctcaatacgtaagccattttattaaaaaaaaataaatgcaggactgaagaatgaggtttcaaaagttatttattttgtctctggcagggtagaattggtatgaaataatgaatagaatcgtgtgatggcctgttaaattcaaaactataccactgttatacaaaggaaatagaataaatttcccatgctccctccctaccgaacacatacacaaatgtaccaaatatataaaatgaatgtgacccttcttagttttgatgattgggttttattatataacatcttgtaaataggatcagatatctaacaaaattatactctgagccacagtacctagatggagaaggctcatcatgggagctctgcctttgagggtacacctagtccctggtccctccctttctctcagcttcttagttgccataatggaggctgagctgtttcacccagctctccatggaatgaggcttctgcctctgtctccatcccccaaaccccaactctgaaggcaagcagcagagcagtggatggagtaatcaaagaacaacagctgtgcaaaacccaaaaggggctgtggttgatgaaaagagaagcagaaaatgaagcagaaacaggccattcactttccttgattctctttccaacaacagcccctcaccactcggggacactgaaagtgtgtttgccctggagactgcttcccttgggatcccagaggaggtgggagccagaggcacttggccctcatggcgcttgtgtatcatagacacgttcctttgtactgctgtcaaactggtagcaacattcttcaaatgttatattcacttgtggttcaaatgtggaaaatatccccaggtgcacatgttgagcacttggtccccagctgctgtgctatgttgggaggcagtggtgatgttagggggtagggcctagcaggaggaggaacatcactggaggcttatgcttttgaagatcataaatgcatagataggtttcagcatctttcttgtctctgcttcctggctgctatggtggatgccaatctatttcacccagctctccccaccaccatggactgaagcctctaaaaccacaagctataataaattattcctttgtaagcttttgtcttaggtattctgtcacaacagtgaaaaattttagtgacccaatatttcttgtttctgcatctgtgaaatgaggctcattgaactatgaatatcttaaaacaatagctatacacagtagatgcaattattatattattgtatttcacatagacctaactgtgtgtgaattaatgtgtgctgagacgttcacattagtctaaacctgtgggaaccacatgtgaatatttttgccaactcatgaagactatggaaaacagtcttttagcgaccatgtgcttttcagttcacacagtgtgtttagcatgttacagagacactgttgacatgctccaaaattctttctcctctgatcagtatcatcttctttaaaaatgaaatatggggtagaggtgggtgtcagaccacatgacatatagtaacttaagttgcttagaagtttggttttcaatagaaaggagaaaaaaaaaaaaggcaaagatgaccagcaaatcagactgtgtgattgttagttctccgtgacctgtctttacaaacatcatgtaatgatgctttacaagcatcattctttcatgattgcttttatgaactataaactatgtacaatataggatgtactgtagatggtactgcaatccttgtaataccttgatatctttcatttattttagtactgccatgaattttgcatttggaattactaatatgattttcccatgtataatttttacacatgaccaaatcaattttattatatcagcttaactagaaaaataagaaatatcttctcaaaagaaaattgttatttttattttaatgctaccagagtaatatagaagaccctgatgcatttatgattatgaaactcatcaccatgtgcaatgagtgtgcagtaataataaattaattaaatgatcttgtttgaaaaattaaaaattttactacagtgaaaaaaaaagtttggttttctgtgtgtgtctgtttccaaggaacatgatttgcagttccaatcagaatgtggaaaagacagagctctgccactgatttagacatcaaggtgggaccaagggtagccttttactccatgtggtacatgtgttacagcctttatttccattggacgtcaatgtcttcacgtctaaaaatgggggaaggtaggctcagccttcatcgtctctgtaattttctatgtttttcctatactaagaacaaatattgtctcattctagtgacatgaggttcctacaatggacaggttcatagataccaaagtagactaacagatgccatggttttagaatgagtatagcatttctgtttgagataggtattagtcatgtccgtaaaaatatgaatgcacttgagtcattgaattgaatacttttaaaattgtaagatttatgttatgtttattttgtcatagagagtgaacttacccatacacatacaactgcttcctagacagagctttgggagcaagtaaagtttttctgaactctatagtcagccatttgagtatttggtattcaaaataaacttgtgatttatggatgaaggtcaagacgtctcctccctccattgtgggagaccaccgatttgactccttccatcttgacttaatggtcagaaagttcaaaactattcttgctcctccaaggttaaacaataggatgtttggccaaaggtgtggctactggatgtcttgatcgtcaatactacattataggatgtctggctcagggtacagtaggttgcttggtgtttggggtattgggagcgtaattctgtttgtttgtttcttgtatcatggtaaggaagtcttttgccttctccttttgactggggtatataagaactgtgagtaataaacttggagccttttacagtattcactgagtgccttcccgactctatcttctgtcgcttgtctatttctttcctcaatccacactctcctgagtaacatacagactcagtggctggacctgacattccatcttttggctgacatgtctacttcttatacttctaatgatacgtatgtgctcaaaaccttctagttacttcctgtgtctctcaaagggacccaaagttccagtttctgtacaagtatctgaaccaatgcttttaaaatgttaccatgaatgtcttagtctcaagtccttgtgacaattctcactctacttcagggtagggcacacgagtcctacccagtcctgacaagtatggagtttgaattatttttatttatttattagttcaagttagggaaccagcttgtttcacatgtaagtcccttctccctctccctcccctcacccccaggagtttgaattttattgtgtcgaatttctctttctctctccctcccccatttgatatgatctccctcaattggcctggaagttctaatctcctgtcgactcagttgacaggaagtcatttcattttctctgttgctgtgtgccctatttgcaattccatctgtcccgatagaggagttccttgggttctaatagttgatggactagagggaaccagatttataaatgagaaagaaaaatactttcaagatatcctcctcgtaatactcacacaggagtctggcaacaaaggaatcccagagcccaccaagaaaataaaattaaaaaaaatctctcattttcctctttcatctttttagctatattagctttctcacctctgtgacagagtgacacaagccactgaagaagaaacgtttgtttagctaacagttcaggggtttcagtcttttatggcacagagggcatgggaagaacagcttctatcatggagaccagaaagaagagaagggagtgagagcaagaggaagagggactctacaatacagtcttctccttttcccacgctcattccagccaggcgctcagcctgtgggatagtattgcctgctttcacagagggtctgcaaccctttatcctttctgaaggactcttcacaaatgtagttacggatgtgctttgctagttccctaagcccttctcagtctgatcaagtgtaaaccaagattcaccaccaccctctttcgcttcagcctgtggagtccaaccatgggatacttagcaacagtctccacgataccaagaattgcatcgattcatttgagctctgtatgtaggctactgagatgacttcacctatttcttcccaaatgccccattaagactcctattccactggaaagaaaaccaagactcatacaagttccttctcaaagtctgtagctggcacaggaatttaaagacagtaccatctggtgagaggccacacgctaattaactctcaccctcagcttcttcagctaggtggtcatactcctggccccgttattaccatataaagacattcagtgaaatataacattatcattagttgaacccatagtttctcaatcttccaatgacaaaggggtcaatgcggtattgcaaatctggtctagtgttggcaagcaccccaaaaatgctgctgttattactgagggaactagccacctgagactgtccctgcctaatcacttcttaagggaacttaatgaatctaattggaaacatctacttctattccctataggattatgtcatagaaaccagagtgagaaaggtgctaaaatcaataaacgagaaagtggagttgaaaatggagagcccaggcgagacagaacaccagtgttgtaggtcaggaggaatgtcttagagcagttgggcaacagatgtgtaagagacaatgtagagttcaggtttacagaatacattttccccctagaagagttgataatccacattacaggatgctatgtttgtcagtagacaatgtgggggtgggccaaagggtaggcagatttcaggccctgttaagcatttagagtgtgtggctaggatcaagatggtactgcagcctttgcttagtcattcatttatccctcacagaggtgggttgagtttgaagagtgagaaggaccctctttctccttccctccctacacctccctcttccttcttctcctcccgccctggacagtcttactgtatagtccagactaaccttgagctcaaaatccttcctccgaaacctcctgaatgttgagagtacaggtccagcttttcctctcctcatctttatttgtaggattttggtgggcagcgatggtagattgtggctgggtattagagccatagtcatgtgatgagcagatagctcggatggggaagtatagaggagagagagatgaagataggagacaggaatgggaccttaccgtgtaaaatgatttctgctgggcacagggcaggtgctcagtatgaactggggtggggggagatgggacacacaacaggaacgttctcctttttccttcatagatgactataacaatattgtggttcccctttacgtacagttacactttcagttttaattacctgtggtcaaccatagtgtgaaattttaaagtagaaaattccagaaataaacaatccataagctttcagttgtgtgctcttctgggcagagtaatgggatctcataccttcacaccttatgtgtctatcacactagagatgcctgtctgtcagccctatggctaatcagctgccctgtgtgtctcctgtgtgtgtccaagaaatccttagctggagctgtcaagatggctcggtgagtgatgatgctccctgacaagtcggatgacctgtattcaatccttagaatccacactgtgaaagagaacccaacacacacacacacacacacacacacacacacacacacacacacacacacacgtgcatgcagcacaaaataaatagataaataaatgtaaattttaaaaaagaaatcctttttttagaaatgacccaaaagcagaagtgttgagatgcaaagaaggctcgatgcagcacacagcacagaagagcaggttactctggcaatactgcaggggccatggggaaaccaatccatttagagatggctgcttgaggtgttaggtgtccactgtgattcttggagccatatggtgaggacaaggggggtgatgctatggcccctcagttgtctcctgtcaagtagcttctcactgttcctcctcttggtaagcctccactgtgcaccagagttgtctctgtcttccttgacccctcccccccaccccagtctcctttactgaccaggtcttttcatcttttggttccagctctggtcctcaacgttatcttcaagacagaaatagtaccaggatggtggcattgagtgtcacattgcagagggtaggagggtgattcagaatacaggctgtggctgtccgggaggggagggtgaggctggctgtaaatcctcaagtaaatcacatttatttgttttattttgtgtgcatatgtgcgggcaggtgtgtcatggagggagtataaaggtcagaggacggcttggaggagttgggtctctcgtactacatggggatggaactcagactgtgaggtatggtagcaagtacatcaacctgctgagtcatctccacagccctcggtcccttttaaaggtgtggcatgtgacactctggaaagaaaaaaaaacattgaaaggaatttaaaatactgggaaagttcccagaaggcacagtgatcacaaggttgtctaggttactcccattttgtcatccatgcttagggcatacgttccaatgaaatgtctttctctcgggaatttttggttgattattattatcatgggcatgtgtactccacagttcatgtgtgaagggttagaagataactctgtgaagtcagttctcaccttccacctttgtgtggcttcctgggattgaactcaagttaccaggcaaaataactcaagttactttatccactgggccatttcactgaccccaagtgttttgatcgctgttttcaaacttagctttttgctaagtttgaaatgcaaattaccactgtctagcttattaactggtgtgtcttttgctttcattattgtgtatagacaatgctgtagttctggtcagttagtgattaaggtgagttgtgatgaaaatgatttttagaataattagaaagtttgttgactactttgaaaagaagaacaatcaactcagtacaatccaggtggggaatggctttgtaaagaaatttttcttcttaaaaatggaaattagatagtaatttcagtgccacgtatggctagtcccagagataaggcacagttagcaagttcatcaatcaagatcatgtatatagcaatatatgtttgtttaaaatgagaccacatttcattccttacaactccttcataaaacaaattctcctctttacttacacaagcatggaatgactaatagtcacaacaattcctgtcaaagatgcaatttaggccaatgccaagatgagagtgcttctcaaggagaccacaggagagacacctcacacacagaacagtacttctcatcaaatgaccagcattcctaagcaaccaggcgatggagctaaatcaaagacactcagtagaaattcaaagaaatgttccaatggtaagtttccgtaagaaccaaaaccacaaacaccagctattctaattcctgaggcacttctaatagtggggctagccacttgaagctgcatgtctcaacctcagctacaaagattcttagtgtctaaccccccaccttcccccagacacacacccttgactaaggttttgacttattggtctgtgatgcagcctggaccttgggatttctcaagtcctcaagtgatgagaagcagcagccaaggccatggcctttaagtgtgtaacagctttataggtttggcaacaaccccatggcctctgacaatgcccttttaagtgcaatgattccattttaggtagccagtgaatggtaagaactcctcagaaagcgcacgctgaaacctgggctttcttggatgaatagagtgagaatttccctgtggacatttaacattaatactttttatgtttattttggtagctttcatgtacagctagagttgcaagcccctgctttgtagttatttaaaccctgatatatgatattgtcttcattttagatatgttggtccatgtgttattgtcagtaacataataccataggctgaatgagctatagaagtaagagatttaccttgtttcaacagttttgtaagttcaggccaaagggccacatccgatgatgcagggtcttgaagtgtgcaggatatcacatggcaagagatagtatgcttatgtacgtgtctcctctggtctctctccttcttagaaagccagccatatttcatcatggtggctctgtgctaatcatcatagcagatcctaattacttcccacaagccccacctctaagcgccattgacagatggggtttccaatctcttaattcctataatagtcgtctttgtgttactataagaaaatctctgagataaccaattttggaaaaaatggttattttggcttgaagtttcagagtttaattgaccccctggcatctgggcctacggagaggcagctcactgtaggcagaagtttctgacccatcctccagttcccaaataaccaacacagaggcttaatagtaattgcaaatgctcggccagtagctcaggcttgttattagctaactcttacattttaaattaacccgtatttcttatctacactttgccacgtggcttgatacattttctcagtataacatgcccatattgcttctctctgtgtttgctcctctctctggccctctttctcccagcattctcagtttggctctcctgcccagccttatcctgttcagctactggccagtcagcttctttgttaaaccagtcagagtaatacatattcacaatgtacagaaggatggcagcaatgcaccccctggcatctgcgcctgtggagaggcagctcttgatgacagtaatgaatggaagaggaagttcctcacctcagggcgagtagaaacaagaccagaggggaagactcttgtctcatacttttctttgaggacacatgcataatgactgacagcctcctactaggccccacctcttgaagatcctgacttccccacagcatcaagttgggggtcctgccatttatgaaggactcttggagtgattgaagatacatcttaccagtactttattattggggttaaccttgaaattgcaggaggcataccctagctaaaccacagtggttggtaactgcagaggcaacttaagctatcatttaagttccactcaagttaaagcaggagctatatcttgcttactgttgctcatacctcataaatgccaagtgttgagtagcatggcctttagtgagatgctttccggagtaaaacttttcttttttcctgaagggaattgtttcaaagctttagaaggagacaaatatctggagggcattggtgccccttactcacagtaatgacccaggaagccagttctctcttgtagctctactggggtagtagagcccagctctgtgcaaatgctgtctgagaatgagaggagaagaacatggagatgagacagtgcccccaccagatagccttcccttgtccggactactcaagcacccacgtttgttctgttggaaaaatcttgctgcctagcacacactgccttcaaactctcaatcctcctgcctcagcttcccaagtactgggattacaggtgtactctaccaggccctggcttttaatctagtctttcctatccattgtttggaatgcctttgaaacaatcatttattttattttatgcatttgtgtgtgtacctgagtatattatgtacaccatgcatatgcaggagcccaaggacatcagaagggggcatcgggtcttccggaactgggaattacaggtggttgtgagccaacatgtgagtgttaggatctggtcctacctaacctggtcctctgcagagcagcaggcactcttgagtgctaaaccatctctccacttcccagaatgccttttaaaaacacatgtgacctttgttttagaaacctagagaagtaggctttctccgaatgtttctgttaggaacgactaaaacccccaccattaggagttggaaaggtgaaaagaaggcaagggccatccacgaaccttagaacacaaggttcaacaaggcagtgggttcctgggtttgtctttctgtctctatgtatcccaaatctggatgtgaagaagcctgcaactcaaggatcgtgagagatccagacaatgccgaaacaaagtcaaaagaccagaaaggaagcagcagaagctggccacacccacaaatcttacaatatccctgatcctcagcgacattaccattgctttaagataaattcacaatactctgtagtgcttgattaaagtttgtgaggtcacagtttgtgtggtctaggtcagcaacccccagtgtctacaaatcctcgtcgccctcagaggtcctcctctaaatagagattaaattctaccctcttaatatctcagagcgggtattaaatttcaacacaggaacccagcccagattgcttgaaatcaggtatggtgataggacatgcctgtaaccttagcacaaagaaggtgaatgcaggaagctcaggagtcaggctcaactctggctatataacaacgtggaggttagtctgggctgtatgaggactctgctcaaaaactcaaaccaaagccaccaaaattaggcaaggagatagacatcatttcttcctgctttgctgtttgctgagcgcatggaagactatagtatctccctaagtccatccccatcactccagagctcagctgccgaagagatcaacacagcattgttctgagtggcactgtcataatctcccggattttgacgcttagggcgcctctttcttcacacccaatcaacaaatttaagcaaaacagaaactgacaaggaggcaggagtgacacacattctcactcatgcagaaagaatagaaactgttctaaaagcagctttaaaaaattagaggcactgacaaaagatgtaaaaagatcttatggaaggaaaaagcgctgtctcccagcttttgacctaataaaatggcccccggacctgccctctcaaggcttttgtgagtggtgagacactgaatttactaaattgtaagtgttcttagggctcatgttgaatctgtcacatgctcctctcctctgtaccttggtatccctctggcccccaatctgcagccttgtttgtagttcaagagctaacattttaaacaattactcaagacattttgcgttctgacatttcataagaatattagtccccagacaccactgtgtgtgaaatataactatttttagtaaccccaattaaatttcacttctacaacactgacacgacctagcctatgcattttggggaaaacatgctgattttctttaagatttttgttttatgtgtacagggagtgtttgcttgcacatacatattgtattacatgtgtgtctgttgcctgtggagggcagcagagggtgtagaatcccttggaactggagtcacaggtggctgagtccacatgttgatgctgggaattgaacccaggtcctcagcaagagctcataacccctgagccatctcaccagtcttggagacgtctttataagaaaaaattgttatctttctaatttttgctatgaggagtaccgccccccaccccaagttcctgtcaaagtttccacaggtgaagctgtgtggaggaagggcagaggtgggcggtatgaaagtgtacctgcataatattgcatcttcattattcagggctttataaaatgcaaatgtagttcagtggtagactgcttttctaggctctggattcacctcctagcccaggaaggctttatgtgatgggtttgcccagctaggtgctagtgtaagtgttctaaacacaaggtacactacaagcccaaactgtcagactttgatcggattattttccataactttgagaaggagtacaggtattttctaaaggaaatttgtcatccttgaatttagttattctatttactccatccacatttcttttttataaaaaaaattatgtatgggtattttgcctggtatgtatgtcagtgcatcacatgtatgcctgggacccagagaaacctgaagaggtgtcatatcccctggaattggagttataaatggctatgagttgccactggtactgggaatggaaactgggttccttggaagatcagtcagtgcttttaactgctgagccatctccccagccctgtctttgtgtttgcaataactttgttaaggggagtgagcaataggatgttgtgtatccaagaatccaaaccccaagtgccattgtacctgattcatcctctgcgttattaactttttaatgaaatcaaattatgggttcatggagtcacagtttaggatagtgataaaactttatgtctataggacttccagtagttaaaaatatagggcactgaatttcatttgggtttcaagtaagtaataaaatgttaatataggtatgcagcatgtggtacctggcaacatgatctagggtagatattgggatggggatgatggatgggccttctgtgaagtgggtctttctgtttcttgcacacgcacaatatttgatcttgtgctttgtctggtacaacttgacaatcacaggctgaacggatgtggtatgcacaccaattcgtgctaagtgatgaccagtttaagatcccagcttcttttgattctcttacttcatttttctcactgtcaaaatagttttcagtgtaggctaaatttcctccagcttctcagaggacatatagcaatgtttggacatatttttggctgttacagcaagcagggctattattggcatctagttggttgaggctatggatgctgttaaatgtcctgtgatggacaggggggaactccttacaatagtgtcacttggtccagactaaagtgcataggatttagccactattctatcaaattattccaggactgttgttatctcattcttcaaaatatcgaatggagagagagagagagagagagagagagagagagagagagagagagagagagagagaattctatcccttatactgaacaagacctggaagaagaaatttgatatactcctttaatttcttacaagagaagtgtataaaaagtgccagccctcaactgccgcagttctgactgcaagcagcctggcctagatatgaagagtttgttctggaactataaaattcaggtgatcatatcttgtaaccctcccttcctctagtgctggagctatctgggactcatttataaataccagctggagaagacaatatgtgtctatcatttgtctaatgccaggactgctctagtgtttgttctagaaggaagctgattactaaatacaatattcacaataaattaaacaatatttcatgtttttattatgctcacctctaattgtctgtaagattttacagacatatatatttatattaaagatctaaataattttcatgatacccatggaagaaaagaggggtacagcattctcatttcaagaggcaagaattaaacctgcctgaagttacacactgattacttgtaaagccaggagcaaagtggtggttttgataggggtagcatatctaccaagctgggcagccactctgtagatgccatctgtttatctgacccttgttagttacttaaagtcttagttacttttctgttgccatgacaaaacaccatggtaaaggcaacatataaaagaaagactttaattgagggcttacagtgaaagggctagagtccatgtccatagtggcaggagcatggcagcaggagggcagtcatggtgttggggcatagctgagagcttactgagtcacaaacaggaagcagagagggagaagtagagggagatggagaggggtattgctaactgggacacagcatgggcttctcccagtgacacacttcctacaataagatcacacctcctaacccttcccaaacagttccattaactaaggaccaattcaaacatatgagtccatggaggccatcctcatttaacatcacaccagtcataaatgtctaatttgaaaatccctttaaatatacatgggagattgaaaaggtttctaatcggaagggataacataacaaagacatttccattttttgtatttatccttttcatgccaaactgcagcacagagaaataaaaatagaaaatagagtaagttatggttcagcaactatttactaagggttgagtgacacccacttgctagatacccaaaaagatcagagataatacatatccatcatacagcatttaatatatagggaaagatatcttatgtacaaggaggaattgggctgaatccttcatctacccaagtatggccaaaaaatcccagtttttgttgaccaataaaaaaagccaagcaatagtgaagccaggaatgttaggcggaggcacaggaataaattcagagggcagatttttcacgtatttactccttagggcaaatacttggagggagcctagtcataggcagctggctccccacccacagcttgattttgaacccaggttgtaggttgaccagatgtatttaaagggacgaggaggctgttaagccttgcgcctgctgctcaggctgtgtgtctctggattcttcagaaaggaacatttccatggtgatacaatgaaggccccttagttctggagcatggtgtggcttggctactctctagtaagtggggactgctacttacaggtcaatggataaaactcttactttttacttagattaggcactttggcaagtgaagtgtatatctcagtacttgttcttggtattatttttagcatgacagactgacttggtggtgtttcatttttctgtgttagctgttccaacactatctgtgctagtccatgtacttcagaaacctaaatttttttaaaaaattaatgtttcttatcatgattttgataaggaatggtgtaaggattcttttatttcttaaagagatttattatttatgtataattgtttgcctgtctacacacatgcatgattggtgctctctacagccagaagagggcacgagatcccttgcagctggaattacagatggttgtcagttgcaaggtggggtgctgggaactgaactagagtctcttgaagaacagcatgtattttcaagtgctgaggaactcctccagtcttcaccactcatcggactagaaagggagcattttcacatttattaaatagtttttggtacatagtgacttaaagatcacagctaaatttaatctgctgtcaactctgatgtgtctcttatgaccacacaattcagaatttactttaaatgctatggtttctctttagatcccccccatttatttacagctatgctaaatatagtgtatttacatgtgccttttctaagaatagtttcttgaaattgaagtgaaaatgctttttttgtgaaaatgcttttatatccttccctttttaatatatgatgcatcatgttaaaattatgcatagaagagtcctatctttttttttcttaaaaaaacatttcaaagatacaggggaaaaaattaaagtagccctatattgactgcgacacactagcaactgtcactattctgcagactttaattcatctttacaagtgtgtgtgtacacacacacacatacacacacacacacacacacacacacacacacacacacgtgcacactgggggaggagggtagattttaaactctagattccttgatctgtcatacagcagtgcttactttgacctcggttacagcaagtgcgaagtagccagtggctgtccagcactcatgtcaaaaaccagcaagccttccttttatcttttaaactgatgtttaatacccagtggggctactaagccgctcaggcactctcctgctcttggttgacactccaaactgaactgaatgtctgttgtcatgtaaaaacacggtgtaagtgcagtagcatagtgtcctggggtgaagaggccagggatgcaggagaggacgagagaccccaagcgcctggccaggagcaggctgcattttgaatccgttttttcccaagttttcagcgtctcacatgaaaacgggtctcaagggcttagggaaagcggcatttaggttcaccctgagggcttgttaaccagatttcagggaggaccccaccaatagcgtttctgattccgtgggtctaggtgtggtaatgcatcctcgggtggtgaggtcgagggtccagagatttcagggacaccaagtgactataacagcatcaccatggaacctgaccggcggcaggggaaatgcatggaggggagcggcggcggtcctgacgtcttccgccacctccatcctcccgtcgccgggaatgggtcacaacagggaagcagtgggagcggtaccggcgcctcaggaacgagaactcctcttctaacttccgcccctggggaaaagcagacgccgtcagcccaggagagctgctctccaattctcagcctttgggttctggctccggagacagcccgtcctcccggggatcgagtgccagcgcagcggcacccacgcagtagccccgcggaggcaggtgagggcggggacccgggcctggtggggaagctgctgggtcgagagccaccggatcccggaccgttcctcgccagcggtccccgcagggcggaagatggctgccccggagcgcggcggacagtcacgtgtcacacaggcagggccgctcctggtcctccctcccacccccgcccccagaccagaccctgcgggcagcgcccccagggcgacccgtgtcactgcggcacgcgcgggcagacccagaagcccgggtgccgggggaggctgctgtctccaccgcgcgatccgggtccccgtgctgggttccgctgtgagagcaggaggaaatctgcgggcgacccgcaccccgtggggccattgggcatgcgcagtgctccggctctggtgcggcgctctccaggttttcgccgcagctccgagcggcggcgggaggtggggcccggccggactaggcggcccggtgctccgagactgcgggagacctccggggcctccgagctgcctggcgctgcgtgctttttaggaaaccggcggacccccgattttgggggaaggtgggagtgtaaggattagagctttgggaaggaactcttccgaagagtttgaggaccatccattttaaatgctcaatcatgaatcagtcacaagtgtcgcagctcttgggcttgttggggaaggaaatcccagtgcagttcgcaaactgctgtccccgatggtggtttctcagccccctggccagctctagccgtacaaatctcgggctggccctaattgggcatctgatcccggaggatgaaacccaccatctgggtccttctcgtcgtggggaaaagcgcccgcctctccagttcccgttgcttgaaacgaaagagaaaaggaccccctccctccatctcccccgcaccccagttcaccccactcgctgtcctgcgggactccgctgggtccccggtcgagcgtccgcggtccccgccccccggccgccgggaacacccggaggaacggaccggcgtcgcgcgggaagccgacccggctccgccgcggactgggcatgctcggcagccggaggctccaagtcggaagccttctcgccagctccgcagcggccggggcagcggcggcgggctgcctgctggacaggagcggggagggccgggggcgggcgggctgctcgtcccgggagcctagcactcgggcgggagagcgcgatcggcgcggagcccgcacgccgccctgccccggattccgttccgcggcggggagctccgcggcgcgtggaaaagaattccggcggctgcgacgactccgcgcgcaagtgagtcgcggggcgggggcgggggcggagggccggcctccgggtcccgggaggctggagctgacccgagtctcgcgggcccggcctgacctcggcgggcagccggggcgagggggcgtgagcgctgtcgcgcgcgtacctggcgggcggtcccccgcggccgctcgtgggggtgggcgcgggggagcgctctggcggccgcgatcccggctccgagggggcgggccgccggcggggctcccccgccaacttgggcggggaggaaggcggaggcgtcagtgggcacctttccgaggtgctgcgtgcgggctggaaggctgcctggtgtcatatcggggcgagcggactgtggcggggcccgagagcccagagccgaggacctttcgagcgacagccggccggaggtcccgcagtgttcaggggtggacccccaaatcgcagccccacccccacagcccgggtggcggagtgacagttggtacccctggtctgatcgcagccggctaggcgcccgcggcgttgggattcccttcggcacggcccttcgatgaccccccaacgacataacaggtgggacccccttcccggaggagcgagcccctcctccccaggcggcgtaacagcccccggctcgcgactgctctgagaccccgcgtgtccccgccgcgtgggggtgttaaagagtaaggcctgcaggggcgtcagcgtagttgtctctggtcgcggctcgcccggagaacgaggggggtctgcctgatcgcaggcgacttgtcaagggcaggcacatcagcggcagcagtgggtgcctctgcccgagtcataacccgcactccggctattttccttaagtggtcccggtgccctggtccagctaacggattcattcatcctggcgcgttctggttaacgcttgatcccttttgactgtctggagtaacagtcagggtgaaggatgctgtggacctggggagctgagagaatccgggcaggtgcttcttggatgtttcgtttcaccttcagacaggacagagttcagcggtgcacacgcacacttacaaaaaaagacagaaggctggcttctgactggaagtttatttgctgtgttctgaggcctgccttctgtcatagctctcccgaaatttaccgtcctcagattgggatgtttctgcttggctgtttggttgtggaaatggtgaatgcctgccatgcttgtgttgtgaactccccatgccttctggcactgggagttgaacatcagcacgggtagggactgggggagcagaaaggagcgagattaatgaggagtgcgattgatcctggtggaagttgcctgaggttttagaggcagtttttgaggtctgtgaggcaggggagaggatggatgttcaggtgtttcattggtcagtgttaagtgtccgaggaaaaagccagccggggttgggtcagtttttctttctttctaaggggagcccaagggatgtttggtgattcagcaggtggcaggtttccagctctgaagccttgccttggtggagcaagcaagctgcagagtccatgctcgctgctggcggtgcctcgatgtggggaaacctccaggagccggcttcttaggagagccaagactcttttcttgtctcgcttcctgtttccttccggatgcactggtcctttcggtttccttaatgctcctctttaactccagagcatattttaaagtctctccaccccagacctactgggtagcaggaggtgaccatcactaactaccatacagtttaggtagttactctaccgagaacccccttctgtttctgtttctgagaccagacatttttattgttagtaaacagatatttttattgtcacttgtcactgacttcaaatatcagggaacttaaaaaaacaaactattaattcaagatattaagttattaaaggcacacatttgtttaaagtatgttactcattggagagctctagtgtcttgaataatgtctgacctgtgtgtagtactcagtaatgcttattcatatttaagaacattttccacaacacaaggcactcgtatttaccacattcaactgtttttgaataaagaatgcacaacagcgtctatgaattggtatgtactggccacttaaagacatttgtgttttcccgagatgcacttgcgttgtgttgaccataaacatcagttttatgtcaagaactcaatacttgttcacattttcattttcaacttgtggcaggtacttctcttgagctagaatctttaaagggtggtctttccaggatagctcattaaaaatgtgaaggaggactccatgctagtagccaccagctgtttttataactaaaatgtgctcctggcacatacataatacatacatacatacatacgtatgtacatgttctctggttgatataacttcatttcctgcaaagcacttcaggaaaactgtgggttccctaacttcttgttatccggtgataagcactagaaaaggcaaactatgctcgggtgctgagaaaacatggtggccagtgtctttctgtggagacaggacagattataggtggccacatctttatctgttttggattgtacaacttttttttttaaagaacttttttggttataacttttcatcaggaatataaatttgagggtggggggagggagagaggatatacatgcttgtttatcgttccctactacatcccaagagttgtgctgccaagtttgtcaccttaattagggtacctaattaaaaaaaaatcgtagtttggatcagttcattttggtgtgagaacagggaatgaatgatgaggaagagagggcagacccttcaggcaggaagatggtttggttttgtggctgtggctgtaacttctggtttcagtcaaaccaaattgaatggctggtgaacaggtgtggccggggtctgctcgaatgctttgtccccctctgagtcttgtctcaacatatagacacaccacacacagatgtagacatgaaaatgttcacacacacacacacacacacacacacacacacacacacagagagagagagagagagagagagagagagagagagagagagagagatccacagatagagacacacaggcagagacagataacatgttaacatatatgccccctttgccaaaagccaagaagaactcagcttctttctttaatgtatcaaagggaaaactaggcttcaatagaatgttgaattctgggggtttgaattgccctgtgcttgtatttgagaaagaactcctgctctcagtggccagctagatatcctttaatgatacaaagctactgtgacttcaaggttgatgcaggtgattgagaacttataacataggtgacttcttttgcctcttagacatggtcagttcttggcatcaggtcctctcattgtacaaagccccttgcctgttgtattgtcatctccgttcctctccgttccctctgctgccagaaccgtcttctctgaggcactggatgagatttggtggtggtgtggggttgtatggatatttgttaaagctgtgttacttgatctgttgtcttctgtttgcataagtggtgccgaggctgtggatcagtggtagagtgcttgcttaagcatgccgggttcggggttccatctggagtactgcaaaaggaaagcacttcaaacctcccaaaaacatttaccctggaaacggtccaacgtctcatgagagctgacagaatttctttcaggttttttattaggcagtttagtgtgagtgtgggcttagcttgtatgtatgtactcatacatacacacgcactgtctaagttagagtttctgttgctgtgaagagacaccatgatcatgacaaatctttatagaggaaacatttaattgtgtggcttatagtttcagaggcttagtcccttatggcgggacatggtggcatgcaagcagacatggtgctggagaaggagctgggagtggagaaggagctacatctggatcctacaggcaacaggaagtgaaatgtctcactaggtgtagcttgagcataggagaccccaaagcccaccctcacagagacacacttcttccaacatggccatcctgtgaccacagggaaaacggaatgaaatgctgactgcattctcttactgatccccaaaaggctctctaggggtagtggctttggaagcttgctccctactggtgatgcagattttggaccatccgaatcagaaaccctggctaagaagccactactctgtgctttaattgcctaacctggagactctgacctccagggaacatttgagagtcactgctgcagggtccgacatccaggatcttgctccgggaggctgagaaatcagcactcgctgaattgctttctgagctgctgagctggtgtacacttccaagctggttgcaggatgctaccctacatccttgttagtagtgttggacatttatcagctctataatttaccagtgttatgtggctagataatgagctctcgttgttttactgtggatttatatgattcttaatgaattggtggcatcccttatattatttagtggggtacagtttcttggaccagctgcccattttgtcttctgttcctcccctcttattctcttttccctcctcacatttgtgtttctttccctctcttttattttgtgagacggttttcctaaaccatcgattaaacaatgcactctttcataattttgattgtatatcatgtttccacatacacatgagaccttgccaatttttcaagagttagagtttatatagataaatcaatttaaaatgtgtactttacttttgacagtgtagctatctttaaactgccacagtgaagatactggacattnnnnnnnnnnnnnnnnnnnnnnnnnnnnnnnnnnnnnnnnnnnnnnnnnnnnnnnnnnnnnnnnnnnnnnnnnnnnnnnnnnnnnnnnnnnnnnnnnnnnnnnnnnnnnnnnnnnnnnnnnnnnnnnnnnnnnnnnnnnnnnnnnnnnnnnnnnnnnnnnnnnnnnnnnnnnnnnnnnnnnnnnnnnnnnnnnnnnnnnnnnnnnnnnnnnnnnnnnnnnnnnnnnnnnnnnnnnnnnnnnnnnnnnnnnnnnnnnnnnnnnnnnnnnnnnnnnnnnnnnnnnnnnnnnnnnnnnnnnnnnnnnnnnnnnnnnnnnnnnnnnnnnnnnnnnnnnnnnnnnnnnnnnnnnnnnnnnnnnnnnnnnnnnnnnnnnnnnnnnnnnnnnnnnnnnnnnnnnnnnnnnnnnnnnnnnnnnnnnnnnnnnnnnnnnnnnnnnnnnnnnnnnnnnnnnnnnnnnnnnnnnnnnnncgaggccagcctggtctccagagcgagtgccaggataggctccaaagctacacagagaaaccctgtctcgaaaaacaaaaaaacaaaaaacaaaaaaaaaacaaaacaaacaaacaaacaaacaaaaaaccccttctaggtgatcacttttgtacaactcagtagtgtgatgtccctgttgggcaagcttcaacacggtccttctccagaatgttgtcgtcaccctaaaccaaaccctgtttcgcttaagttcagcctactaattttgagatgcctcacaggttctggtattttgttcttagttctctcccagtcttctgtttttgtgccaaacccatatttcttcatttgagcttttgcaccgtgtttgatatgctgggttggggccctcttattcttcgacgttggcttgatctttgctctcccatatacattttggaatgcttcttaaattctcaataaagactaagaaacgtgattggtattgcttgggttacagtttcaaggagagaactgtaataatttctattttgatactgaattttatcatggtcattgtcatgccatctttaaaaataattacctttaaataaagtttaaaattttctctgctgtggtgacatttttccttattgtttctgaaacttgaattcagggctgtatttgtgctaaacacatggtcctattgagttactaccaaccaatgggcagtttttaagtggtatgtttgggcacagtttaagtttggatgttgtattattaactgttgtttttctgttgtgaccaaacacccgagagaagcaatttaagagcagagacataattgcattcacggtccctaagcattcagtctgcggttgcttggcctcatggaggcagcttgtggaagagactctcacctcaccatggcaggtgacacagagctaccaggaggggttcagggacaagatacccccaggactgattggtggcctactttttccatctgtggacagtcagccaaagttttcaaaagcttccatatagctccgacagctgggaaccaagccttccttcacacacgtgcctgtggtagacattacatacgaaaccacaattgttcctaccttatgggtgtagacagaggaagggcttggggaacaggtctttaacagtctcttcattttttccagctagagtgacatcagtcagttttttcctcctctctgtttcattgctcctagcaaccccttcctcaagcctggacaagcacacctcatctatgaggctccggactgacgaactactctgagtgcaagaactgttgctcagggagtgctgatgtcatagcgcatccaacactgactttaaatcgtgaatttcggactttcacctgcttctaaggatttatgacaatgcactgtcaggaaagcaaagtgaaggagccagccaaaattagtgtgcggccctgcagatctacatatgggagcctgggcctctgcctactttcccagaaagaatgggtacttccaaggaattttacagctgagtggggaggaatataaacgtaatatacaagaaacaattagaggagtctttgtgacagatggtatataattagggttaagtgctgcagtgccaggggaattatgggaggagaggaatcggttcttggagttttcatttgacttgtgtggcattcagacagggaggagagaagaggaaggtgaaagccagtgtaattagcgtttctgttggggaccctgaggacctgttgttgaacttcatggtaatgaatgttgcatctggattttaaaaaaaaaacattaatatttttatatttatttattgtgtgtgtttgcatgtttgcacacacacgtctctcagtgcatgtatggaggtgggagacaacttgcagaagtgggttctctccatccaccagtactcctgggaaatgagctcagactgtgaggcctagtggcaagtgcctttgcctgctgaaccatcctgccagcccatgtgtctggattctgatgtcttcaaatcagtgttctgataagtagtgatagctggctggtgcatgcgtagataactactagtagctctctgagttctagaattgtgggtaaaagtgtcaaccatgtagctcgagtgcttggatttgcctttcagcctcaccgtgtaagggctgtacgctgggcaggttatgtggaccagatgtgcctcaggccctgtgttcttggctggcataagaacagcagctaccttccagggttgttgagtagctgggagaaagacgtaagctaacatttgtaaggcactgagtgtctattacaaagtgtgtcccttagctctctgtcactgtggcaaaataccagagaatgggatatctctcagtgtttttgtccaccaccccttttcttctcctgaagataggctggcctcaaactgaaggttctcttgccttagtctttgagagccaggattccaggcacagcctcccccctccccttttaaggagcaaagattcaatttggctcctgggctcatggtttcggtttattacataataaagaaggtaggcagggtcgaacagactggctctgtgagagtgcacaatgaaccaaaggaccactgtgctgattcatatgctagacatgcttttactcttaccagagcatctagaacaggtggggtttccttaggggtgctctcctgtccagatgattgacgggcccatttgtattgagttttactgggagggtgcagtggtgtgtccttgttctttatcagaaagcttcagggctagagtaatcttcccaagtttgggactccaggtactaggtttacatagccatctgttcttgactttctgggaagtttagggtgtgtcttctccttccaaggtcaaagatgtaactcaagttccctttctttagcattaattaagaggcttgcagctctgttaccttcttgtacctggattgatcatgaggggagggcccagccctgatatccatcaaatctactgatttttgtctacttaacagtgggaactcatagtagagaaagccattcacctctcagcagccaggatgggagagaaggctgagaagcctagggtccttagatcccctcgcagggtatgcctcccatgtcctgactccattctactgggccacagctcttaaaagatgtcaccattttccagtaacatcatagtctgggaccaaaccttcaaacatgggcatttgggggatacccaagttccaaactgtagtagcaatttagaaccatgtaaatattatctgctgttctttctttccacttgtgttgatattctcacagccttcctctgtttctaatcaggtgggtgaggcttgatgcaccagagttgcttggcttttgtccagaaggatcttgtgggaggctgtatggtccagtagcgtgggtgtgggctttctgcatgccgtgggatgtgcaaggcatggtaaggggttgtatgtagatggaacaaataagtgcctgagacctcgatgaggcctgcctcagtgtctgttgttctgaatgtcttccctcagagctctggaatggagtgggtagaaagaaaagacgatggtgaacacacaggaagcaagtctcatttgctatttttctggttctgtttaaaccttttggcagaactacagtcatcacagggattcgtggagggctgatcacaaaccaactggtatctgccatgaccttatggtgtggatgttgccattcctttttggagacagcaaagtgaggcatgaccctgagaaaataggaggaatgtcctgaaggagatcatgtttggaactcttgcctgttggcaaaaaacagtgggtgctgttggtgaggacccagcataattatgacaggttgtgatacacaggctggcccaagctgggtgttccccatgaccgtgtgatcttgggtgttcctctgcctgagctagtgggcctcaggtttcagtttgcatcacttttaccaccaagcctgcttgctgggcccagcccccagagtttctgagacaggtagcttgggggcaggtggcagccaatagtgtttttgtatgttcatccgttcccaggggctgctgccattgatctggggacatgctttgggaaccaccacccaaagccattgttgcagcagcctggaaccagttgcttctacctcactagaatgtgtccatttaggatggcaaagcagtgccctgctcaacactgcttgtggcatggctaagagcagtggcaaactggggcgtcagcagctgatgatgtaaggttcctcagagcatgaagtgccacccagcatcctggcttaggaagatggcatcatttgttttccgtccccacttccacatgcccagatcaggggggtgctttctgtccaccatttagccccaggggaaaaggaagcataggtgattaaagattcctagcctggcagtggagagctagaaggcagtctagtttactgatttaactgtgatggtaaagtgttttgcagcaagaatgagctcagcgcctctctgagagggcaggtaagagggctaccacgtgggcacactgatactaacgagtcctcaagcaacataaacagctgcagttatcatagcgggtttccctgtgtgagcagggttgagcaaggttacaacaaaaactggaagggacatcttctagcctagaaaagattttgtgagagagacatgtccctcaggtagtgtcatcaccacatagtgaggtcaggtcacagctgagcaccaggccccctgggacagtggtctcttgctgcagcttccccgaattggctcagtgtacagaagggagctgatggcattggaaggcagcttgctgtgggcggagcataagtggtcctgggggcggggcttctgggaaggtgggacctaggagtggtcattggcaagaagaactggtgaccaggactgtgctcctaaagcacctggagagtcacagggacattgccagttcacatctttgcctttaaagatgcagccagaccagtccctaagatgtgaacctaggaaagatgactgacttgcttgtcagtttgagtcttagtgctgaattctgctttcagtggctgtgctttctccctctcttattcctgcctcctcctcctcctgaagtgtccttataaatgagggcaggctgagcctgtgtgccagccaagtggctggggaaccttgggcctctgctcatgtgtttggaagggaaaatttggaacagccgactgctggctagctagtccccagatcatagctccctcccgagcttgcagcatgcctgaacaatgcagcccgtgtatttacatcggcagttgtttgctatccctttgatagtgaaactgtttatttgagcactgttttctgtggccctgctttgttttgttcatgcccaagccacttgatagaaaacagcagttagaggtcgattttccagctgtcgaaggcttacattttataagggagttataaaaggcctctgcagggaacacctatggctgtcagccaaagccaggctgcccaggtcacttgagatggaggagggcaggtaagggtagtgatggcagatgtgcctggctgctgggtcacacttcagacctgggtaacaggaactcagctagcaaggacataagcttctggttgtgaaagctggcagggagcagcagcaagagcagtgggtgtgggcttgcacccttttgggctatcctcacgtcaagtggaatattagccactacagcataagtgttgtgcgaagaccctcagccatgcccatggggtgtatcgtggcatcctataattgtaaaggtggctggggatgttgcactagactgtgatgttaagattctaggttagaggaaggtatgctgttcctttcttcttagggctgatgtcctgatcattcagtggcccagagatgcttggagcgagacccggtgctgttggactgggtgacccctatttctctgttctctgctctcagaccacgttgccccttccctgtgatgttaccattgcttgcctctgttgtcagtacacctttccaccttgcagtctcctgtgcatgcgcagcaaggcaccaggtgtaggtcctggatctttaaggaagtcttggtggatggcctaagtctctgacacttgagctttagtgtgaagtatataagtgtgggcagaacaaagcctaggtcacatggagttttctgagttatgggcaacaggttcctaattgaggaagcaaaggaggcacattaggaggtcaagaggctactcctcatgcatggaacagctttgccaactactcacaagatttgctttagtgcatagagacacctgagttactttggaaggccctccaaagttgccatgtggccctcaacctcactgattcccatttgattgtaacaacagaaaccagactgtcagaacattcaggacttctgcaagctacaaaagtgtagttaccatttgttaggtggtcctgtcagctcccaggtctgtagctgaattcctggaaggcttgacaatgagatgtggcccttttaggggcataggagctggagcactcattgacttcaccacgaaggtgtctgaaggccaactgtcatgacggtgggtgaaaagtgaaaatcttacccctgagaacttgacccctgagaacagggtgcttcctgttttttagagggcaagtgattactcaagaggaagcaggtgggcatgttgagaaactcataggtgatgcaggacttggatttctgttttatggatggcacaggctcagaggaagttagagcaaagaggcacagtgggcacagggaagtggtgccatgttatactgttgtccggttctccaaggcaagaagaggggctgagccgctgggaagagaagctgatgggcgttggtgctaattctcagcttgctgtgtcccctggatttaagcctggaaaggacagtttatgactttggtggtcattgtcataactgtccaacccccgaaagttcatgattgttgccttcaggcgaggcattgccaggcaacttttaagagtgatagcatagatatacactctatgatccagccattctgcctttagggtttaatttaaagaacagtcaagatcagtcttcacgccagacctttggatcagggatgcaaagttggaagcctgatatccaactgtaggtgttggttaaataaattgtgtctatccacataacaggctagaagcaaaccttaaaaatacacttatgaaaataaaggtgttttgagaacattgttagatacaaaatgtacatacagcttttcttaaaaaactaaactcttaataccacattggctggctgtctttgtaagcgaacgatgaggcgattgcacttaggtgtggctcccacacttagggagcttcagtctttgagcgagtcaggccccactgagttggccaactaatctccttattattgcagaagagcagtctctatggcctgtaccccgtttcaggagtgtctctgtttacgtggctggatgtcagttctggcgactctgaagtggctgaggtgttacttgtattatagatgagtgctcttctgttgccttcttttccttccagcccgtacctggttctgagtgcagggtatttcagtcttagcgctggactgacacccacgtctctgtgaatggtgactggagctgtagagcttgtgctgagtacagagggtggctgcttagtgactgacagcttagcccacctcctctcctctcccccttcattttccatctccatttacagaacgtagtaaacatagtagttgcacccttgtcacctgtaatgaatggctcttgctgctgcattttggtatacagatccctgcattccacccccccccccatcccataaatactgaatgtacaccaagtgaacatgttagcccagtatggacagggacgagctcagagggacaacccaggcagtgctcagtctcggcaagcggaaatcatttgtggtataaacccctggaacttcatgtgcatgcatttttatggttttaggactcagatcctggtggagtttggtgctgtagtgttggatcttaacttcatagcagatatgatcagtgtagggaagtgtgacattggatgcaggctgaatttgagctgggggtggggggaagagcaaagtttttcttatttggactattttgggtagctccaccagtgcactaaaccaagagtgttggtccccaagccactgaagtttagtgaagtaaatgactttgctccctcttagaacttctgggtggctaggatgctgttttgtttcagccctcctcctcacccctacttggtcctctgctataggagaaggtatctggatcatttcagacacagaagtgagcagcagggtaatggattcccagataacagaactgcttcctgacttggcatctgcatctcagctttcacagcctgtggctaacccccagcatctaccctaagaaagagactgagaatcctcataggggtagcatgtgggggacattgctctcgtgtgtccacagttggtcacgttttctgcaagtacttgttgcttatgagcgagctctttgggattgtcacaggacatgctgcttgctgttatcggcacagtgctagttttcttatattcaaccagacttaagacacccagttatagctaccctgtctttgaacatcacatgtaaatatgtacagaatctctgcgtgaagtcatgtttgtggttggctggaggaggttttagtttgtttgtttgttttgttttgttttgttttttctgtagtatatgcctggaatgcccaccaacggtggaaagtgtctttggatatcactgtacacgcccctgtgctcagccttggtcacagtgcccctggcctgctgatgctgtggcctttgccattgcggtcactgttaacataaggagagaactttctgcttttgcttcccagactatgactgaagatcaaatttggcaaagtatgagatggaagacaagtttgaggctagcctgggctacactgccagaccctgcctcaaaatcaaagcataagaaagtatttgtctatgtggtttcaaaatataataattctaagatgtgactgaaattattctccgtacttttcctttgaaaaacacaaatatcttttagtttcaaaaactgaagtaaaatatacaggcataaaatttagcattttagttattttaagtatataacttagggcattaaataggttatactcttgtacagccatctccattgtctatctacagagccttatatcactggaagctggaagtctgtgctcagtaaatggttcccactctttttccatagcctgtgtctatggatttgaccgtcctatgcactcatatatgcattacatggaatttcctttttttatccaacttgttttacttagcaacatcttttcaaggttaccatatattgtagcatgtattcagattttcctttttaaaggctaaatagtatttcattatatatatatatatatatatatatatatatatatatattcatcccatttaaatgaacacgggcgaatgtgcagtgaacattgtggcctacataaatgttggtttgaaccagtctttcagtaggccttaagaagtgctaagatattggcttcttagtgatcagtcactttgtccaatttggttacaggcatcagaactcccaaaccctttgaacagttttagttgatggcattagtgtcgcccgaggtcaagagagcagctttccattctgaggaatactcttcctcttcccagcacacttggcagcagcttcaagccaggccagtcatcgttcttggaagtcagcctggtcttatcttttgctgtgatagctcttgcctgtcagtaccttgggaggagaaatctggccttcttagcgtttgcttcctcaatccagtctcaggtgattaagctctcagcaaacccgttgtggggctgcagataggagctgcagtggtgtgtgtatcttgtgtgtgtgtgtgtgtgtgtgtgtaggggggaagcagaggcactggggtttctgctgaggatgacaacgaggctgggctgacgttctgggttacgtgctgtgtttggacagcaagcatcataatttttgtgggtggattaaggaagttcaggaacgcccgagtcctagatagatggggaaaaaaaatctcagtctacagattatgatttgtatttttctccaaatctgtgtagtaagggaggctgtgtggaggccctagagcctcccctccatagtccgtttagtggtttggtcatggtctacctttctgtggttgtcgatagatttttgtggacttacaggaaattgagattaacttcctattttgtggggaaagtatgatactttgttccttcataggcctgataataatcaaatgtggctgccataaagtgtatttgtttatgctgtgtagatgtggaagattaccatacacggggttggaaagtagtaggttattttatttgggaaaaatcacttacatgagaaaccgataacccaggttcagtggtgccagcatccagtctcagctgctttcagagacccaagagagaccctcacttcctctccccaggcctatatcccatatgccctgtcctcacccatggccatgcccaaaaggtcgtgatcagtgccaccagtacttagtaagatctctccctacaatgctgcctacgcttttttctgtttatattttctgaaggtacacaagagaaagtgtatcctacttactggcagtactatggaaagtttttatagtaaaggtctattttctttctttcttttttctttttcttttttttgttttttcgagataagagtttctctgtggctttggagcctatcctggaactagctcttgtagaccaggctggtcttaaactcacagagatccgcctgcctctgcctcccgagtgctgggaggcgtgcgccaccaacgatctattttagatgttgaaaaaaaacatgaacctaaatagttgagtaatgtttgctaagtcagaagtgtgcgccaccaacacccgagtaaaggtctattttcaagctgtatgatatatgtgcatgtgtatttgttttattttcagtatttattttatgtgggtgtggtgtctggggagatcagaggacagttggttttcttctaccacgtagaggttctggggatccaactcaggtcatgagacttttcaggaagtgcttttccctgttttaccatgtctttcactacgttaattagctaggtgctgggaatggaatccaggccctcaggcatgtcaggctatgccagggagttgccttcccatccttgacactagttttggtcctaccatccagagagcctcattcttgctccttggctgtcatgagcggatttgcttctctcctctggctgtgtgagtctctcagcatttctggctgacttaccttcattactatagccctgttttaggccctacatctggagactgcctgagttgtgcctgtaaatgtttcctatagccctgatatatgcaggctacaggctggagtgtggcccacaggggcacattacaggctcatgtgggtagaccagtcttatttctttggggtagggattggcaggagcatgaaaatataactggtaaagacactgctttggtaatatcctttggtgtgtgtgtgtgtgtgtgtgtgtgtgtgtgtgtgtgtgtgtgtgtatgtgtgtgtgtgtaggtcagaagacaaccttgggtgttgtttcttaagagcagtcctgtgttgtttttgagatagggcctctgactggtgtgtggctgtccatgtaggttgggtgtcttccttgccctgataatgtggttttgagtaaaaaatgtccttactgtctaggatgtatagctaaatcagtttagcttttaagcttaagactctgtgggagggaatcatgagaaaagcgcagagctttttgttttgtgccaaagcctctattttgggaataaactctgcaggtcagaaatattgatgtgaacattaaacccaattcttcccattttcttgttctatattttatttccagaatagttaatgcaactcctactgggataaacagtagcatgcatttcaagctttatgctattcttaattttaaaaaaatggtaaataataacatttcaatatgctcatctttgtcttgattctttgtctacatgtagaagacaaattttgcacactttcacaataacaagtattccaagtaaatagtactagagggctactttaagaattttctctctctgtttttcttttgggggatgttgagtacagctcaatggtagagcacttgcctgtcacacacaggaccctcagtttgattgtcagcaccacaaaaaacaaaccaaaataaagcaaaagtgcttcagctgggtatgactgcacacacttgtaatcccagaacttgggaggctgagacaggaggatcacacaagtttgatgtcatcctgggctacccagtaagactgttatgtagttcatagaaacacgccaaaataaaaaagaacttttttttttttttttttggttttttgagacagggtttctctgtggcttttggaggctgtcctggaactgaccaggctagtctcgaactcacagagatttgcctgcctctgcctcccaagtgctgggattaaaggcgtgggccaccaacgcccggcgagaactcttatttttaattttctcacattttgttgctgctcatacttttaatatcctttgaaatgttatgggtgtcaaatttaaaggaagaattctggagcatttgtctataacatgcaagtccccaggtgccatctctagcattgctaaggaaaaacaagcaaatcctaaaaactacacctgtttgatgactacggtgtttctgacttcatttctttaccctctaaatagtcccgccctcccttctctcagggctttgtgcaggccaggcattctttctactctttatctacaatttctccatgcctcaattttatgtatttattttttgtgtttttgtcatgagttaacatttggaagagctatcctttatattacatatttcaagacttaatttcttggatttttgttttcagtttgcagagctgtctgctagagatttcattcttgatgaggttcaatcatttgtagagctcagaagtagatgagaaccaaggtagagaaatgtcagacagtgggaggaatgtgttatggtgtaatgaaagcaaaaccaaggctttgattcttgtcagagatgggattggatggcagctctgtcagttaccagcaatggatgcttagcaacgtctgcagatgatgagcaaatggcttgagtttttgagcattaatggcatctgtaaaggggataatagtgctgacctacaggtttattatggactcaacgtttacagacccccagtgcatcatgcacgttgaagattcctgaggcaaaagtacatgagaatgtagttacacttctgttattattccagaggctgtagagacagagacgaggacctttttagctcaattggggatatcttcttcttttacaaaacactttttagttatgtagatgtgtgtgtgtgtgtgtgtgtgtggttaggtaagtgtgagtgaaggtgcacttgaggccagaggtgcctaatatcctggaactggagttacaagcagttgtgagctgccggttgtggtgctgggaagtgagatcaggccctttgcaagggcaatccatgatcttaattaaccctaatctgtccagcccttgagaacctcttcttgttattcagctgaattctgttggctggacttggccatttctagtttttttttttttttccctttctgattgctttttcagctacagagcattatgctaaaaaatagattacagtaaaaatttctcatccagagttcttggaaatgaattagcttggcaagctactttcccccagacagcagaggctttacctttaatgttttctcactaaaaactatttttcatctttaaaatactttaaatgttcagaaaaatagggcaaaaatgccttaagcaagcatccaaccccagttttatcaaatgtgaatattttgatgtgtttatatacttacatatacaaagtatttataccgtgtttatagtgtatataattcattttcacaagggtgtaagttgagggactatggtggtttgaatgaaaatagctccataggctcatatgtttgagtatttgattcctggttggtggaagagtttgggaaggattaggaggtgaagacggggatataatgagttcactagacccaaaataaatgataaatgggtgttttgttggggaacaacttatgcagataataataaagaaccgccacagcatttctctgtccttctgattcgatccacgacctgagagagagagagagagagagagagagagagagagagagagagagactgccccttccttctggttccctccacacctgaagccactcccaaaggggtgtggccactagcacaatacactggcaaggataggtgttgctacaaggaggtgtgcccttgttggaggaggtgtgtcactgggagtggactttgagatttccaaagactcataccatttccagtgagctctctctgcctttggcttgagatctgagatgtgagctctcagctattcctgccaccacgccttcactccacaccatgagctctctggaaccataagtccaattaaacactcttttatgaattgctttggtcatgctgttttgtcacaaaatagaaaagtaagtgataaggagaacttgctgtctggctgctgctctctgatacttaagacagtacccagtgagtgtcaggctcaaagttaaccctgtaaaacaggtccagcaccattcccctcttctttcccagatgtaattctagcacagacagctgttgaacagcaaagagctaggttcagacagtgacactaatgtcccctgataataactaccctcagggaatgaatttcagtgccatgatacaagacaggaaaaatgggttcagaggtggctattttggctgcctgtggtggccacacctgtaattccagcacctgaaggcaaagacaggaagatcaggaattcaagttcatactcagtgcattgtggtgatatattatttatgatttattaaagcttgcctgaggattcagaaagcaaagtcagcctcaagcaatagcgaacaggcagtggtacacacctataatcctaggactcagaattaagaggtagatgtatctcttttagttcagggccaccatggcctacacaagagtggagactaacagagctcacacctttaatcccaacgttaggtaggcatatgagacaggagcaaggtctcagagctggcaatcattttctggccacattgaggataggaagccattgaagtctcaggattctccagccacattgagaggcagcagtctgaggcttggtggagccatgattgcccctttggtctgaagtagagtgagaactagtgcctggctgctttgctttcctgatctttagcttgaagcttgaaccccaatatctgtctctgggtcttttatttttcgtgctacagtgcgtagtgtgtgtcaggcctgcttgactcctccttgagaaaaaagaaggaagaaatgaaatctatagaaactatgatgctctcttccatgtagctggctgactggatgtctggagtccccaatgagatgaaatttgaggaaagtgatcgggcaggttccggggctgacaggacagccaaaccagagctgagcagttaggagagggtttgtagagatcagaactttgtggatgagggctgcctgctctatgccgagggagtatcaagaggagatactggccagagaataggactgtcatgcctttcttacatataagggtaacactaggccccaactaatggctaattgacatattaactgaaaactgatatttggaaaacagactgtcatgatatgatacgataaggagtatgtatttggcctctgcccatagtttctgccacattgtcccttaatgccttagaatctacagtggaaagagtgtctgatggctgggaggtcgaggttttgggggatgggagctggtctccagaatgagcaaggcaagactagattggagttgtctcagttactttcctgttgttgtgatgaaacaacatggctaaggcaaggtagagaaggaagggtttatccaagtttacggttccatcaccatcctggctggtacatgtgacagcaggcagacctggcagcagctgaggggcaggaagtagagggcatgaactgggaatagtgtgtggctttgagacctcaaggcctactggcaattatagactttctctagcaaggccacatctcccaaactcacccaaatagtgagatgcagggaccaggtattccaacagctgagccaatggatgttctcactcaaacccccaccaaggggccgaaggttgagttgacgaccagtgagtgccaaatgctctaatcagtcatgcctatgtagtgaagcttccacaaatccctgggccatcttcagccatctgcaggctctccaaccccatccttctcggggaggttgaaagagctaccttaagtcacacagccagaagagatctagactttagtccagatttttttgttgttttgtttttgagacagggtttctctgtgaaacagacctggctgtcctggcactcactctccagaccaggctggccttaaactcacagaaatccacctgcctctgcctcccaagaactgggattaaaggtgtgcgccaccaccgcctggccagatctttttttcttatacaccgctcaatacatgtcttctggcatcagatgtgtgacaggcagttctttaacatgacacttgctactgaagatggttcagcttccactgtttaaggactcagtcccacaagactggcccccacttcagactgttttacccgtgtttctgactagctagtccccatcccccaggtgtcactcatatgccaggaaggctcactaactcagggaagaacttactttttctggtttatcatgaaggatatcataaaagataacagatacatatcttgatggtggagcaggagatgaatggctaggcaattgctgtgataaccctggtcatgtgggtcggatctttgggattggtgtgaaggaggaattggaagcttgtggctgtgggctagacaagcctatgagctctgtaagcagggttcctggaccactgtcctcatgactttcagaagggaagcaaggactcttacccagaactgactgctggaggccgttgtgtctccttggacaagggatctgactgcatacactctgtgccctgaaaacgtgagtgcaattgaagtaaaaagtcacagagtattcatttggcagaggaagtttcaaggcaggatgatggtcaggttattgtggtacggttattgtgctctgcgtttattgagatttacagtgtgagggagcagaaaacaatagaaacaggaaaaagcatacagtctgggaaggaaatagggacgcgaacctggctaaagtcgtaggcaagatgtacaagctttaattgttacagaaattggtgccgttaaggggaaacctggacttttcattgtgaccataggaaaggtatcttgagagtaaacctcatttacccaggggtccaggggctgcagtacaggttcacttgtcaagctactgccttaaaagttagggccttcagaggaccctgcaggaagatcctgccttaaagacctcataattaaggaatttcttaagtctcagaacaggctttggactttgaacattgttgaacttgataagactacagagaggggctggagaggtggctcagcagcgaaaagctgctcttgcagggaacccagacttgatccttggcacccacgtggcagctcaccacagtctgcacttttagttctaagggatctgacattctcttcgggccttcttggctaccaggcatgcacatggtgcacagacagacatgtaagcaaaacatttgtacacattaaattaagtaattaatttaaaaagattatagggactttgaagctggacttaagtgacttttgcattgtgacatggctctgagcccatgggggccgggagcagaatgttgcagtacaaagacaaaatgtactcacagaagttcatctgatgagcacttggtctcagctgatgggcagtgctgttgtggaagacctttgggcagtggggcttagggtaggggctggctttctagcctcaccctgcatcctgtctttatctctgcttcctggtccatagagatgtgagcatgtagccttatgttattgctgctacagcctagagccacttgtcctgccgtgccttccctttatgttgcactgtatgtaccctcaaaatgtgagcccaaattaaccctcccttccttacatttgctgctcaccagatttttggttataggaatgagaaaaataacaagtgttctgattagtgtgtactggtatatcattgtggttttgatttgcatttccccaataattagtgctattggacatttactgttcatatatcttctactcatattttctcctgtcactgtcattattctaatcctcttcccagtggttattatgccatacatttgatattagcaatgctgccaacctattacaatatattccaaagatcaaggaacaaggagagaagggggtgggagaaaatagacatacatacgtgtgtgtgtgtgtgtgtgtgtgtctgtgtgtgtgtgtgtgtaaaacccctggggcattggtagtggcttcagttttatgaaccaaggccatgcttaggagatgtctgagcatttacaatatgctctgagccaataacattacccatatatagttggtgactttggacctatgagaatcaacttcttctcatctgtgaataggagtgtgtgctgcatgtctctcagaggagacaaatactagtttattgttttggaagaatgcaaacatgtggagcagaatgacttgtccataggacatactgaaaaaaactcgagcagcagtcacctctgctttgttcacacagctcacactgttctgaggtggtttctgttccttctcattatctgctttggaaaaccaccccttgttaagcctttgctgccctccctcacataccagagcagacatgtggctcaggctttctcaggccagcgtcagtgggttaggaatgactggatcgctccagttttgccacacagaactacggtcctgtagctgctgctgctctgtcattcttcctcgacatgcaaacaggatcagttaccatggagacgcctaggcactaacatggacactctgttccaaagttcacacttcatatgtgaaatgcctcttaggtacagcacagggatgctggggagaagccttatctccttgaatagtggtttatacagtgtccaaagagttcattttgccatttactgtctttttttttttttttttttttaaatcaagattggttcttcattggccagataatttggaatgattttcaggaaagtagaaatatgttgaaaaaaatgctgctattttaaaatgggtgattaagactttcctgatctagaaaagttaaaatgagccaaatgttttactttgagtccttttagctccagtgtttgtaccaaaatgtgtaatgcttactaatgttctaaaaggttgatcttgttggctaggttattctgtttagggtagtatagaacaaggaagccgtttaaaaaatatttattatttatctgtgtgtgtctgtctctgtgtctgtgtcagtgtgtctgtgcacgtgtgtgcatgtgcccacggaggccagaagatcgcatcagagctggaacagcagttacaggccgttgggaggctccctgtgggtgctgggagcccaattcctgttctttgagttaagagcagcaaatgccctctctcacccagccccagaactaggaagtctttgtttgtttgtttgtttgtttttcgagacagggtttctctgtgtagctttggagcctatcctggcactcactctgtacaccaggctggcctcaaactcacagagatcctcctgcctctgcctcccgagtgctgggattaaaggcgtgcaccaccaacgcctggggaagttttaatattagtaaaaacccactaggatacgtgtatggctgttaaaattttatcaggtccttaattgtgaagcgtgaggctttgcaggtagaaacagtatgtgtaaaatgagctcactgcttttttttccctgctaagtagttggagaatgtttctcttcacttttcagtgttagcatctgtgtaagatgcctactgtgtgtcaggtgcattttctgtgttgatctcattaattcttacaataactctttaaaatcaaatatccccattttgtagatggaagttttatgtgctagaggatatttgcttgtcctgggtaagtccagaaggaggaggtggtgagttgcgttcttctgcctgtcaggacatcaggacatcttcacaggattctgtgtgtttttcctttatggggactgttttcagggtctaagtccaagctcaggcgataatccatcgtctacagcagtgattcccaaccttcctaatgctgtgaccctttactatagttcttcatgttgcagtgacccccaaccataaaattattttcttgctacttcataactaacttttctactattatgaatcataatgtaaatatatgtgttttccagtgatctttaggccctctgtgaaagggtaattcgcctttttaaaatttttacttttggcctatgctattttccccaactttttcaggatttcagagcttaattttcttcaagaacgaaatggaaatactacttctgggcatgtaggaagacaataaaggatgtagcccaacactggagtagtgcttagcacacataggtgcttggtaggtgcttagtactgtaatttaaaaagcagcttggaaaagagagaaagacgctaggcaacagagctcacatggaggggttttttattagggaaaaggggtggggagagggagaccagcctctggggacaggagcagcagaagagaagagagaggcagaggggagtggggagacagaaagacaggcagagaggcagagaagcagaggaggggggcggacagacagagaaagcagaagatagaaagatgggaggtgggcagggcccttttaaaagggaacgtagtgaatgtgcacaggtggtgctcttagtggcggcagctgagggtgtgtcctgtcagagccccaaggacaggccagcacagatgcctgaatactaacacttagtgttcatctggtgcctcaaagggccttctgacatggcctagaagagctgcctagaataatggttagggtgtggattctaggccaggcataaaggcatatgcctaaaacccagccaatgtggaggccagtacgggagcatcctgagtttgaggctagtctgagatatgatttttgattctattttcaaacaaacatgcaaattcagactgtggaataaatgtcttgggttcacatcctggtcttgcagcttatcagttgtattgtgtacagtttcattgctttccgtgcctcagtgttcttcatctataaaatgggtacaatgctcctacctcataaagataaattgtgtaccactttgtgtgcctggtgtctggagagggcagaatagggtattccagcccctgaaaatggagtaacagttagaaatctccatgtggttgctgtgaattgaacctgggccatctggaagagcagcagccagtactcttaactgtcaggcttcctctctaactacaaggtaaataattttaaagagaaaaatacaaatttctgagagattgagttcaaatgatcccattaggtaacattttagttctgtctttccgagactccttgacttctttctttttttaaaaatttatttatattttattctgatttgtataaaaatggtttccttgccaaattggaagaatttcttattacttgtatttagtgccaagggaatcatttgtgatcttatttttgctagaaacgcagattgttatgaagttaccctttccacgtaagaaactggattaactaactctgcaaaggaattttttattaaatatttttttcatagaagtactaaaaagaaaacctagttgtggtatgtagtggtttcatcttacagctgaaaaacataaaaagcaaagcctgaagaactgtttcctagaggcgatggactcctctgctttagttttgaattcggctgttgtgagcaagttcatgtttttttccttttacgatgacagcaataaggtaggaccacactgtgaatccagcaggaagaaagcagcctctgcactttctctagtgtagaagtggccataccccacaggcagcgtatggttctggctcagcctccaccactattctgaagtctgtatggtgccttgctaatgctatgctccatctgtctgggtcactgctttggagattgtttatttgcagcagtgatgctgaaaagagaagctctctcttttgttggatgaaagctttccctataattagtaaaacaagcatgcctcttccttacagagagactggaaaggcgtccggagtcctctgtacacaaacacttggggaaacaatttggcattacttagaggactgaacttgctcgccccccccccagactcaccatctttccttaggtagagcctcaagaaatttgctgtgtgtaccagggcacatgtgccagaatataatagcatcattattcatgacagcggaacattgaaaattcctaagatcctcagtagtgaaatagagctgggacttgtgaatctgttcacacaatgaaaaatgtggaatggtgaaaaaaaaaatgaatgagccaagccacatgaatcaacaaggacaaatctcagaatcaaattttaaggaaagcagaagtctcagaagaagatacacaatatggtttcctttacatttggcttaagttaagcaaaacacaatggcgtattgagaatacatatgtggtgaaaccataaagagaaacaaatgactgattgattcaaaactcaagctagtggtgcatctccatggcttcgaaagtggtaaagaatgagtagagaaaatgcagccaacaagagtgagagggagagagagagagagagagagagagagagagagagagagagagagaggagggagggaggggggaggggagagtggagagagagagagagagagagagagagagagagagagagagagagagagagagagagagagatgcagatgtctgtaatcccctggattctgtggtaggataggtgatgcagaaaggagggtgtctggaaattcacaggctgacaactagcctggaatacagcagtgctgtgcaacgaacaggcctctttgttgttcacagccgtgcattccaggctgtatacaagagttctggggaattgaacttgggccttcatgtttgcattgcaagtactctacctgttgagctatatccctagctctggtacagcttcttgagggtcttcatgtcatggcagccagcttccctccaaagacagaagaagacatgaactgcagttttatgtagccttagcagcatctctttggcctccccccagtgttgcagcatttacccccagcagcctcattcactgtggcagggatgaactacaccagcgcagggatgctgggaggtggagatcactggcctccatttgggaggttggcttccacagttactctttaaaacatatttcaagaataacaactttttagagacaaactaaattggtaagtttattttttatagtaactatacaatcgacactttaaatgaagattactgcagataatgtcttaccaattagaacaggaaaatgtcacacgtatgaaactcagctccttcatggcaggtgcctgcctgatgagtttatgcctgtagtgggtcagtgggtgggaaggatggtgaggaagattggaccccagtgatactgtcgacatgtgatgaagagaagggcttccaggtacccagagttcattttgcctgcctctgcgactcctgattttgaagagctgtcttcataacgaggatcatcatgaagttacattccatggcatatctgtgccttctctgtcgctgtctgtagtgagagtggagcagtcggccacacttcccttcccatcctgtacaaatgagagcaaagctggaaatggcctaggggagtcaaaacaggattttttttttccttaagaattcatgaagcgattgcattctacctcttggtttaatattaacaacttttaagttattagtttatttgcttaaccttctcccacccaaatgttcgagtttggatcaatgtttctagaaaatatgtattctccccttagttccgtgtggctatagaagtggctgcttagtgaataatattcctgggtgtctaagtgtcctggtttataaggcagagtcactagtctcctttttttgaccccaacatctctggaaggcagtctgagctccaggtgaggatgcagctgggagagcatctctcacttctttccattttattttgttttgtttttttgagacagggtttctctgtgtagctttggagcctatcctggcactctctctgtagaccaggctggcctcgaactcacagagatccgcctgcctctgctgggattaaaggtgtgcgccaccaatgttcagcgtctctcacttcttaagctcactcactggtggagtggacaggaggtggcacccgccaactcccctcaagcgtttctcaccggttagtatcacatctccaagctctgtgtgtgcagacatttgctcagtagagaggcccttcccaccagcacagggagaattttcgttctcccctctgcttctggtcttcatttgtgggccaccagtgtcagtgccacggtattgcatcatagtttttattttatgaaaaggagagtcctcaccagcaagggcttcctttgattactgcaaagagggaaatgaccagccttccaatgtgatgtttgttatttacttcagttggccaactatactcttttgagaaaagggaggaaatgaattatgtgtataaaatgccaaaaatacacgaagggttattgtgcctataagggaagtataattattagtagtaattatagtcattgtgatgattacaggattaatggtactattaagcatgattgtggatgtctgctcttaggaaacaatgttgtagcacacaccggctccctcaggtgagagtgttgtttggccctttggctctgggatgcgtttcggaagggcatcaccattgcttggggcagatcaaactgtgagacaaactcttgattccggggccagaagctttaagtaggaatttcatttctgttatttcctagttgatgtctttgttagatgtcatctctgactcttagcttctttctcaagagggccgtaaactcactcagagctgtggggaagctgaggtgggttaggtacccctaatgcagatggtctgtggtagcaatgtgagtgtgtcatagaccacagtgctctgaaatgtgtagctgggtatagcttcgatttgactatccttgcctcaaaggattagagtaagccctgcctttttactgtgattgtaagagaatacctgatgcacatggtatgagaaattccaggtcaaaaggtggtacgtggatccttacacctccagccttttctgagtttgggctgtttggaccttgtcacctccttgaaatggtttcagataagagaaactcacatggcaccaagattgggaagttgtaacaacatattgtgagttagaaatttgcggagagcagagaactgtctggatttctcaccacaaataagaaagtaactaatggctgagagtgagtggtccatacatgtaatccttgcactctgaatacagggtgaggggaccgggagttaaaagccagcctgggctacatagtcagccatggctcaaaacaacaaaagaaggtaattaagtacatgaaataatggatatgttaattagatgattgtggtaatttctcaatgtatacatatagtagaacgtcactagacagtttttgtcaagcataccttaaaatgaagccagagagaggatgaaaaagaagttcactgtgagatttcttagaggcaaagatttctagagtgaggctgatcgaatttcccacggtcaatatgggaatcattgttttccttttatatttctccctgttttgtgttttccaagtcatagcaaaattttaatctcaagacttgccatataagtacatctcctgccggaaatggctttagcggattacagttgcttgctgctaacgcattgcttcttgccgtttgcagggtgaaggcagcatgagtggtgcctgtgggcagacttagccatttgattttatttagaagacagccacccacttggaaggtgagtaaagacttgtctgcagcattttacttgaacaattctcaagcctgctgaagagttgaaagagcatacagtgagcttctgtatgcctcgaagctagattggaatgctgttagtgtttttttttttctgaatttttttcctgtttgggtaggcttgtctctttaaaaaatattttgattatttttttgttttgttttgttgaagcacatggagtaagctgtaagcatcatggcattttctcttaaatttgtaggagcttctaaaaataataatgttctcccatgagtgacattttagaacagtcataaattatgtgacaccaaatcacttcagtaaatgcttcagtgtgtaactgagatcttctccctcatagtttacagaaataaaagattttaaaccaatgttgttagcattttactaaaatttttatctaattagtgtaacgacagtttttatctaatggatgggcagctaagcagtctgaattaggttgataagaacaatgtgaatatagaggtatggcgctggccccacgtaggagagacatctttgcttgcccaccgtgactgcctttggttcgttgggcgatggtgaccaccctctttcctgatcagtatttcataaagtaagctagtctctgtgatctaatgtgattgaaggttggttaattaaaaaagaaaacgtaaatctgtaggagaatgtggaaagatcaccagtggccatgtgaaatcgaggttaatatgttcatttcaacactagtgaggcaaaaaatgatcccaagctctgggacttgactatttgagtagaaatcatacataatatctaaaagacttgctgggctttataatttttgtagtgattgtagttacaagttcttacacatcggattacacggaccattatttttttgcagggtagctattgactgttctgaattccaggtttcttataagtacacatattagaaatatatagctcaaggtaactttacaaaccaaacatatgctgtgtgattagcacctagatttaggaacttcatctcatctggtagacactatgctgatcttctgacgtgccagtgtgtgtgtgtgtgtgtgtgtgtgtgtgtgtgtgtgtgtgtgtgtgtaaagtataacccagattttattttgtgtgtttttgtcaaacaagcatctactactgttgttgcatacaaatgtagactgtccatgttaattgttatggagcatttgcctgtgtgaaacacaatgatttatttattccagccaatgtggatcatttgaaggggttcactcattcaggctatcctccaccgaaatggggattgagtgaggtttatctttcccatggctccagtggggtagcagtaggatgtccagcctttggccaacttctgctgtttgtgaagaagtcctgaaatgatggcagtgcaggcgcatgtggagctctgtgtggtttcttcagtcctccttgaccccagctgctcctgtgattctctgctcttctctgctggcgctgttctctggatccttctttgcctctcttactctgcatgcccccaggaagactgcagactctttcagacatgcctttgctgagtagttaagcttagtgggtgctgattctaggtgttaagtaaggggggaaaactgtcagtgtggccttgcccttgaggagccacagttacggacacagattagttgtactctagagttcaggaaaggaaattcagaagcgttcatacactaagctgataacagggctgaattaacagacaataattggcattgtggagatttgagcatatataactaagtatgtctggctcagcttagcaagttgtttaagggctagaagatgccttatgagaaagtatactttttgccagactctgtttttctaaataaagttttattcaaatacagttgtgctgatttgcttacaaattgtgttatataatagagttgaaagttgggtaaaaactcagggtatatagttgcaacaaatgatatatgtggctcacaaaactgaaaatatttatgagctgcccttttcaaaatgtttctcagcttctgctttatgtcactaaagcaagaaatagtagggataatctatgtggtcatataaaaatctgagctcatcaagtttgttcattcattcatccaacaatatttaaagtgccattatatttatgcacaaatgatgataatcagataaagtttgtatacttagaacatttttaagaggcgcttgagtgtaatgataaatctttccaccagcagcccgagccccactgccacatgggtgcccaaaataacacacagaaacttatattaggtacattgctgctggccaatgactaggatttcttatatcctcgctttgtcttgagtgtcaaccatagccattaatctatatattcataaagacttatggaggatgcttgcagcaagcatcctcttcccgggatcacatggtggctccacagagaagagaggaggaagaagagagcaatttcctgcttgtccctgcttatattctgagtctgcctgctatgttacttcttgcctggatctcaagacttctctttcctacatttcccagaatactcctcaatccctagtcccacctatcttgcttccctattggccaacagtgctttattcaacaaccaataagataaccatacacagaaggacctcccccatcacttgagaattcaaaattccattctaggtttgtgtttactatgagatataccaaactacagtatgaaaatgaaactgtcagttcctcaatttaaaactaatatatcaactgtcttagttttataaaatctaaggtactctctgtaatctagtgatttattcagtaagaggactgactgtatagtgtagtctgatatacaccagttcttagagctttaagatcctaactgtatgcagtgtgtaactccatccaggctgtgtgaccactgtctggtctgcagagggggaggggagcttttggtgggcttatcacagcaagccatgcagacctctgatcttatgctgctgcaatcataacaaacctcaacagaaagaacagcaaaccaagataataaatacagtgtgggatgtagtgtaacaaatgagtctatgttagcgtgcttatctgtttgcttgctcaaggtcatacatgattatgtttaataggagtctgtaggcattgctgcaaggaacacaaagtaatgccttttatatttctctgaaaaatgtgttttaaatatcattttgacctagatagtgtttttctttctccctacatatgtgtctgtacaccgtgtgtgttggacatactgggactggagttacagacaactgtgggctgccatgtgggtgctgggaattgaacccaggtcctctgggagagcaaccagtgcccttaacccccgagccacctctccagcatctaaaaagttgttttttaattgaaacaaaattacatcatttcccttttctccttccttccaagctactctcccttgagcccctccttcgttcctgttccccctctcacattgataacttcctttttctttgattatgtaaattctaatcccatctcacaactcttgttctttttttttttttttttttttttttttcctgcttcctaagctctggtgtcaaccattttgccattttcatgaagttgactatttcaaatctatcatgggatgggacgaggagtgatggtatgagtgacagaagaacccggggtcagtcccatcaggcccatttcctctacgttccccagggtcctgtcaggagctgttcgtaagcctggagttcagttggatcctatcatgttctttgtagttcagtgtctgtgaacttgttggtggaagatgttgcaatttgcttcatttctcagaggctatgtccttcctataaagaggttactgttactggcacagttgggctaagtttaaatgaagagacacagtgaaactattttgtaagtcattaagcctgatgtaggaggtgacattgacttaaaagtttaggttttataatttttttggttttgtgttttgttgtttgttttcattttctttgagacagggtttctctgtgtaacccgggcagtcctggaacttgctctgtagaccaagctggcctcgaacttacagagatccacctgcctctgccctctgcccccccccccactccccagctgctttatacttttttaagggtccagttcctttgtgctgttctcttcctggtgtttaccttgtactatgtaaatatgattcgtgaatgccttgtttagtggctcagctacatttatcttaattttttaaaaaattccaccttttctttttaaaggcatcaactacagcttttcacatgaggctgctggcaacgttttaccatatatcagtttcatcttgaaggactcacacctggaaccgtatcctgggcatccgtcccttgtgctgtgggcttgctgtgctgtcctttgcagcctgcttctggggagctcttggaccttgcctctgcattggctttccgctttcctctaccccacattctgatctttcttcttttatcttctaattttgcaagctttctaacaatttgcaaatgagaggttaagacttctgagctgctatacacctgagaatgtggcactcgtgtataatttattgcctggcatggtgtagaattcctggctgcaaatcactgagttgcaggtagggaagtgtctcccagcatccaggctccacgtaagaacacaagaacctaccgactctctattctttctaggaccttttattgtgtctcttcattcttttatcatctgagtcagtttactgacatgcggcggtcaggatagacttcgtttctttctttctttctttctttctttctttctttctttctttcttttttctgaaatccaaatggacaccgtaatgactagttttatcatgtgataaaacctagaagcatttggggagtgaatctcagggaggaattgagtagatcaggttggcccttgggcatacctgtgaaggaattttcttaaatggttaattgaggcaagaaaactcaccctgaatgtgggtggcaccatttcctggtttggggtcctgtttaaggagagaattagcagggtatgagcatgcttgcaggttgtttttttttttcttttttttttttctttttttttctctctgctcttgcttgttaagtgactatttaccttgagttcccgccctgactcaccgactgtaaccaggagttgtaaaccacctaagcccctcctgctccaggctctgttctgagtgtttatcacaggacctggaaggagggggctcttcctagttttgtgttctgtgctacagtattggcttttcccattgttttctcagcttgcttccaagatgttgacttgtctgtgagtgcctcttcccaaagacaattctcaagtttttcttggaaatgcttctaaagttttaagtttgttaccatgtttattttctgttgttgatatttccttagcgttttcataaactgggtattctgagattttttttttccctttgaaactttatttttgcaccatctttgcttctagttgcatccccctcccgcaccacttttcttctcattcatgttggattttttatatgccggatggttctggaaggtctgtttctgaggcagaacagtgctttacaaactagaagatttatcttttgctctgtttaaatctattgccttcattttccagctttaaaaacaactttgaagattttattttctgcttctgctatctttatccttggagatttatgcctttttaagtgaaatcattgtttttgtgttgagaattttgaagagaggcactaaatgtattttctaatttaacttgaaatccatttggaagccttaaaaacaaaaactgaaaacaaacaagccaccagccctggaggacaggctttgtaggaggtcaggcttcccagtgtcattgtcatggtttgggcagacacaccttcagtggtgagtgttgacccacactctatttttaaggcatggtatatatttagatggtctcagtggagatcttggctttcttgttaactatgcagtggctgtctctccttttttaggttaaaggcctttattttaggtacttaagtaccaataaatgtgtaaatgataattgggccttctgataaaaaatgcttcaaaagatcctccttgatgtttctaaagggaattttccaggagctcagcatgtaatccttagattaaaatgcagtggattcattaagttgtttcccatgaaaagtggaataatagactttaaatttatttgcctctggccacccacaaaggacattcctgggccaaagagattagatataaatacagcatggggagccgggttaaatatgtgagttttattcttagcaaatgcttctaacacaaagtagtcaagctcacactggccatgggaaggtaaagaagttttaactttcattcctagagcaggtcactgcaaacatgaggcagttttaggagggtacaggctaactgactggattatttcataattcacctctcttggtggtcaattaaattgcttcctatctctctgaatgtgggatgtgcctgccgtctgtgtccccacacagctgcttggaggaatgccctggtcactgtgcaagaagcaagatatgtttctggccttggtgttcaccagataacaggcctcttttcagacaaaagtcactcctcaaggactgccccttgtgcactggagagacacgggaaacctgtttccatgttgattgctcggaaagcttgcccatggcacttcttgtggttgtgctgggctttccattggaactggcctgctggacacacactaggagcctctggagaaaccagactcacaggtttcctgcgtttagaaagtctctcttgtctcatgaaactgcctacagtctagtactatttttagccaaattaaatataaataaagtataaattcttgcttgtcaggacagggaccttcattgtttaattagtttgtttgggacttcttgggacctatgtcttggtcactgccttcaagactgcctccttgtttctttttttatatggaagtaaaatgaactctgtaaactgtgcccaccaggaccttcagtgctaagagggggctgtgtggatgatgacacctggcttaaacacgtttaccttgggtttcctgcttgttttcatctccattgattatctcagttgctgcctctgcaacttttaaagttctggccctaggattggcccggtatctccttggcttttctcagcttagccaaagaagcttggatctttcaaaaacctctgtattctgagaggcagcaaagggaaaccaacgcccaccccctcagtctcaatgaaaaggagaactataactgttgtgtgcagaaaccatcactttctgaacttgctagaattagttcatgctcagtgcttagagcctagctctgtactatttataggttcctggataaaagagccagagcaccaccaaagacagtttccaagaacatttagagtctatgcttgagggacagcagttattaaaatttcattctgtagccaacatgatataggcactcagtgtttgataactgttatttgtctctcatccaagcattaaccagggcagaccctgcttagtttctgagatcagacgagatcgggcatgttcaaggtggtatggccatagacagtaattgttgtttgtattccttaacaaagttctgttagttgaaggtgtgtgtgtgtgtgtgtgtgtgtgtgtgtgtgtgtgtgtgtgagagagagagagagagagagagagagagagagagagagagagagagagattgcctaatgggtgacctcaaaagtgtcatcaggagacaaaagggttaaatttgtgacacagattttatgattcaaaaaatatgtgaagtattatggtacagggaacagctttgtcatttgtcacttcttgaggtagtcatgaataggcccctcatctggttgagaatttaactacccagtttctctatgagaaaaattgttctccagcagtgtgaatgaactattctatctattgtgggactcttccagtttgtggaggaggggctgagaagaaaaggtggcatttatggaatttgactgttctgccagaagggttgtgctgtccagctgcagctgtggtggttgctggaagagagctgggacaaggctttgcgatcagtgcctttggtaggatgtctagagatagtgggcatttcatgagaaccctgtggggaggccccagttagaacactttttgggagattcctgctctgtccaccataagatgaataagagttggggcagggggaagaaggtctgtgttattgagcagtcaaagtgtgcccccctcatcattgtctgagctcaggtcctgaaagaagtcagagaaattattagtctggtcatcgctctggagcccaaggccaccaatctggtccctacaagaaggtctactcctgtgtagaagctctccatctcagatgattgtcatcatagtggtctgtactgaaggatttgcagttcctgaaatccgaggtgaggtctgaggatgacttttggggaaggcggttctcttcttcccctgcaggtgctgagggtggtcctcaggccatcaggcatgcccagcaagtgctttgagtcagtgagctgagccatctaccagcctttcttcagggctggtcctcccaccttacaggcttgcccagaggctaagctaaataatccctcacaggtatacttggaggtgtgcctcctaagtgattccagaccctgtcaagttgacagtgaccaccagccatcatagaagtgacacattataataggaagtatgtaagtgaaaagggcctgatgtgtgaagctgatggtagaagactgtggtaaagcagaattcaaacaggcaaacacagaagacatggcaattacatacattctttgggagccatgtttcctgtgaatagctccgtgaatagaagctatagagaaggaattttatctggagggattgcatgttgagtcaccatgcagttgaaccatttttcacggtgtcatggctttggttactgttgaaggactgacataaatgactccgcttttactgttgacattgagacaaggtctcctgatacagtgcaggctgtccttgagcttgctagtcctgcttttgcctccaaagtgctgggattataggtatgtgtcagcatgctcagtgagttcatttcagtcctgacagactgctcccactacctctgataactgtcctgttgatcttggttggctcctgtcattgtgatgagatctgtcccctttggtctgatcagatcccccccccccccccgtgtgtgtgtgtgtgtgtgtgtgtgtgtgtgtgtgtgtgtgtgtggtgtgtgtacacacgcacatgcatgaacagcagtgtcacagatgataagaggtcagtaccagaacctgttttggtcaaattcaagcagttagaaacttacctggagaccccaatgcttcggttctgtctgttctgtggtaattcttagtatcttagaaatgccgctcagagaattttgttagaagttgcccctgtgcagtgtacagcagattcaaagctctgcaaggagaatagaaagcttacaagagcaaatgtctaaagaaaaacaaaatacctgttagagcaattttcagtgacctttacagtaaatgcttttgagaaagatggacgctctagatgataaaattagaccagaccagaatgttgaaggaagtttcctaactgatagacctgttcactctcatttcacatagcattttagagtgaaagttgtgatttatatgtaatacacaaggactgtaagagttaccctaattttattttttgaataagcttaattttattttccttttaagcagtgatttaatttgtcaatggcaggttgcttttatatataacttcccatttcattttgtctgttttcttgaagagctgtagacattttttgtcaaagggcttttccaaatctgctgaggtgaccaaatgctttctgactaaaagtgtgtttacatatatagtaaacatactgaattttgtatgttgagccaaacttgtatcctggaatgaatccaattaggtgattttttttgggggggtgtttgagacagggtttctctgtgactttggaggctgtcctggaactagtagaccagactggtgtcaaactcacagagatccacctgcctctgcctcctgagtgctgggattaaaggcgtgcaccatcaccgtccagcaatgtgtgttattttagtttgcaaaaattttattaagaatttttgggtcagtattcattgaggaaattggtttcaagttttctttgttgttgctatatccttatgttttggtgtcagaggaatgctagactttagatgtgtgtgtgtttggcaatgttcctcttcattttatgctgtcaaacatcgtagctcatcttgaaagcttggtagaatttgctggtgcatctgtctggccttgggctttcctttggggagaccgtttttttacggtcttgttcattgttgtgtgcatctgtttaaattgtgtatattctcatgacataattttgacagcttatgtatgtctaagacttgatcctttttttttttcttttttgactttcatggttttcaaaatactatccaatgagtctttggatttcattgtaatctgtagaaaccacctttctttggtttttattttttattaatttggttctctgtgtctctctctgtctctgtctctcatgttggcaagcttgggtagcagtttttcagtgttttagttttacaaagaaccaagcctttgagtctgtgtattgttgtttttgtctccatttcattaatcttttctctcatcattatcatgttttgctgtctgctgctctgggcactggattattcttgtttttataagactttaagttgcaacattggattatttatttgagatctctctctctctctgtgtgtgtgtgtgtgtatgtgtgtgtgtgtgtgtgtgtgtatgtgtgtgtatgtatgtgtgtgtggtgtgtgtgtgtgtatgtgtgtggtgtgtgtgtgtgtgtgtgtgtgtgtgtgtgtgtgtgtgtgtaagcactctatgtataaacgtcccattgccttggccatctcttcaagtgtctggaaactgtgttttcattttctttgccctccaggggtttttaaatgtcctccttgttttctttagtaactcgatggccattcgagagcactttgtttagtctcatgtatttgtgtagtttctgtcattttacttgttgatttctggatttattgcattgtaatctgattagatggaaagaattacttcatttcttttacattttgtaagacttagatgtggcctagaactgagtcttttttagacagagttccatgggctgtagaagactgccttctgaatctgctggatgcattatttggtatgtatttggtgagtcctttggctatatggcagtgttctcaacatgtgggtcacgacctctttggggcttcaacgactctttcacaggggttgtgttatcagatatcccatgtatcagatatttacattgcaatttataatagtagcaaaattataattatgaaataactttatggttggcagtcaccacaacacaatgaactgtattaatgggttgcagaatttggaaggttgagaacccctgtgggttctgtggtatagtttgactctagagtctctttgtcttgtgtgctgggtgaccgtactagagttatgggtgtggccactgttattgttgtgggacctttcccacctctgatgtccattagtatttggttttggaaactgcctgtccctttctctgcacttttatttcctttgtggatttctgaagctgttctctctttctttagtgatggttttctctttgtctttctttctttttgttttttgtttgtttgtttgtttttctgtgaaacagtcctggttgttttggaactcattctgtagaccaggatggcctgcctctgcctcccaagtgccggggtgaaaggtgtgtgccaccaccacctggagtgtctgttttttttattattctggtgcttcctttatgggctcacacagaggcagctttgagctccctgtcttacttggaagcagtttttacttagaataaaagtctttttcaccaaaacacaacctaaattcttcatattttcttgtatgtctgcatacatgagtttcacatgatagacttttaactcttagtaatattactcttagcaaggtcacaggaaaagaaagaaatcttaaactgtttacacattaggaatttatgaaaactcacttataagtgagaactgagcctacatttatgagggactgaaacagaagccagttatgaacaccgtccatatggccaaactgttttgtgtttctattagggtgcatgggtgtacgtatgtacgtgtgtgtgtgtgtgtgtgtgtgtgtgtgtgtgtgtgtgtgtatgcatgtgcagggaacaactttggaagccattctttaggagccggcggctaccttgctttttgagacagggtctcagtggcctggagctcacgaagtttggtaaggtagctgctcagtgagcccctggtgttcacctgtctccctagctccagggctgggattccaagtgcatgctgccatgcttgtgttttgtcttttgttttgttttgttttgttttgttttattgttttgaacatggttctgaagcccagactggagctctcatgcttgtacggtaagcaccttgcctttccagctgtgacatggatccatttgaaggtgatttttacaagtttccatgggaggaacagctttgtttatttttaaatattttatttgcttcttattcttgagtttatagtgaactttagccggatctgccataagataagaccttgaataactgtcattttaagtcaccagacgaggaaagaagagtgactagacaccagctcctacacatgcatgctagaactacaggttccagagccattccaagacatccattcctgtctcctgccccacccacatctaaatagtggtttttagtggcagcactcacttggttgttagaatatcccaacagcagtgttctggaccggcttatgatgcaggctgactagcccttatgggagattcccagagggcctgttgtttaggagtgggatatgttcttagaatgtggtctgtttcagaaaaggttccatggcctgctgagaagcctgtgccttctgaggctgctggatgcagtattttgtgtgtatctaatgtgactgttggtgcgtccgtcaaattacccatcattggtaaggacattcattatagacacagactaacatgaaaaaaatacctcaaattacccatcattggtaaggacattcattatagacacagcctaacatgaaaaaaatacctcaaggcagctacattaattgcttgctattttgtggtttacagaagactaggcagctagaattctccctacgggacaaaagatcatgtagacttagtgttttccatggttacgcaagttacaatagagatttcctagggctctcttgggttcctgtgctttgtgtctctttccgtgccagtaaatgtccaaatacttcaagtcaactctgatttgctcaaaaggagtccctagaataaggcctatcaaataaatgacaaatgcccatagtgacagggaaaagaaacgtcaaagcccaaggaacatggattcaggaacattaagagtcagcattttgatcctgtgaagttcaaacactagtttctctgtatcaatgaatagtggtagaaaatggctgatgctggcagaagttgggagaccagaaaatgtctctggactaaaaatgatcccagaagctttttttctgagtccagagttcacttgttatgagtgctgctgccgaaaagtcatcttttattctggcttggttgtcctaagttgtaatcagagtttcaggcagaagtcagaaactgttgtggtggttttaatgagaatggccgctgttaagctcatagggatggcattatttgaaaggattaggacatgtggtcttgttggagaaagtgtgtcacttggggtgggctttgaagtctcagaagctcaagccaggcctagtgtctcactcactctctcttcctgctgtctgctgattcagatgtaacacccttggctccttctccatcaccatgtctgcctgctgtggccatgtttcccatcatgacaataatggactgagcctctgaacctgtgagccagcccccattaaatgttctcctttataggcgtgtccatgctcatggtgtctcatcacagcaataggaaccccaactaagataactgctcctggaagccttgataatctaccccaaaattccagttaaagaaatgaggatcatgtaggacaagtgaagagaaagcagaggacagttgaaggcatctttctggttagcaggctatgatgtcatctcagttgtcaacctggggatgtgtgtctcgaattctaattggacttaataataaaaaccctgagtcagatataccggcaaattctgaaagatcagagaagcagaacagccagctactagttctaacctctactgaatcttcagaccaaatgggcgatcctgtctctaggagatctcagattgaatatgctgagctcctgtctcctcccaccttgtattcctctttctgtacagccatatcactcctgtctccacctccctagtgctgggattaaggcaggtgattccaagtgctgggaccacaggtgtgagctctgtttctcttttagactgattcaatatggtgtagctcagggtggccttgaactcacagagctttgtctgcctctgtctcctgagtgctggtattaaaggtgtgctccactactgtctggcctctatggctaactagtgtggctagctccacactctgatcttcaggcaagctttatttgttacaacataatttcaccacaggtatgcctgtggaggactgcttggttaggttacttgaaatgagaagacctattcacccactggcaaactctggagttggattcagaccaaggagaagtgagctgagttgcagctctcaactcttcctgtctgtggacacaagtgactgggtgcctcttccttacgatgatgaattgattgttcctttgaactgtgagccaaaaaagacctttttttttttttcttttttttttctttttttttaaagcagcttctgtcagacacaggcatttaccttttacatttgatttagaatcaataaatttctacccaggcttttgtctaagagcaagtgcagaaaacccaataagtaactgtgtagtactgttctaactttatcagcaagtaaccatgcagtactattcgctactaactttaccaaggtcctggagttagactgtcagcaatggaaaggttctcagatgcacaaaacctaagctcctaacacaggtgactgtggatggatggaagtcattctctctctggttcagagcctgcagggacttaaaaactgcagagaacacatcacagatggtttcactcaattttcttccttcctcacacactgactcttcaattttggggggacctctggtggctggtttatcttatgtaccccagtggtccttgtttacaaatctaatttatggtgatactctcaggagttgctttatttttcctagaagaagggctgtgagccttgaaggaagaggtcttttccccagcagctgtattgaactcaatatagtgatagtgtgatcagctccaagggaacaccagtgatgatggatgatgattctttcagggtgagggaggggggacaagagagagagagagagagagagagagagagagagagagagagagagagagagagagagagagagagatggttgattgctggctttgccagcacacttgctagatgcatgatgttagtctgtgtcactatcctgtgtggctgtcagttgtcctgagaactttctttgatgataaatttcctaaaaagcagacacatcctcctccttgactattactgtggaaagggccttttggagtcatagatttttttttttcatctgccaagtggtgtatgccattttaaaacctcagcgtaattataaggcttgtgtgcaagtataattataattgtgtgcaagtaatgtgtttttatatttatgatcattctgtatgtaaatatagtttgtagattttaaatctaagctatgtatatgtacatacacatacatactacatactacatatagtgcttagcagggttttagacacatggtagaactcatgcacagcagatgttaccatactgttgtgtgttagcatgctctatttataatcatggattgtttttcactagttctgtatggtgccactttgtgtgtgccaaacatggttccaaaagcaacagtgctccttgcaggagaacggaaagggtgccaggctctgtgtgaattgcattcagattccaacatggttttcttttgctatccttttgatttttaagccttattctttaatgcctactgtggtctcttgaagtattagctattagaattgatattgttagttcatgatacctttttgggaatgtctagggcatcagtaacacagcctgataaagatgtctacagttcttctctttttaaacctcttaaatttgcttatggaaggaaattgttcataaagcaaactgaatttattaggcagccataattttttccccagtggcttgattacaagtgttatacttgtaattggccagaggtaagaactgtggcctcctggccttttaccttgatcacatggttcccaattagagtcctaatagtataatattgagggctctgggattctttcctacctcaaacccaaggcagaagacactgatcctatctaggtccttgtggtaaagtcttattctgggcttcaggctggctgcagatatgtaagccacccaggctgacgttaagctctggatccttctgccttctagaaatcataaatgtgcactactgtacccagggttcatcatttattttcactctttgaagaatttaatgcctccttcaataacactagtcatacagggcctcattatataagactgtatctggccttgaactcgtagggaggcctctgcctccagagtgctgggatcagtgtttgtcgttatgcttggtggcactatctctacacttccaggctctgtttatagcagtgcttctcaaccttcctaatgcttcgaccctttaatacagttcttcatgctttggtgactcctaaccataaagttattttccttcctacttcctaaatgtaatcttgcttctgttatgacttgtaatgtaaatatctgtgttttctgatggtctgaggcgactcccgtgaaaggtggtttggccccataaggggttgtgacccataggttgagaaccactggtttatattaatttgattttatattaatttgattttcaggattgttaaaagaatatgttccaaatcatcaaagccttaaatgaatgtttgtcttcttagaattattgccattataagaagagacctgaggatcaataatagatttcctgcaagaggtttctgttgtactcagtgatttcacataactgagctctgcttctttcctgtctttggtattgagagaccaggacaacaagttttcctgcaggtgctgaaagctgtttaagcagtgaagacttaagccctttgctttccagtgataagaccctgaggaagcctagacaagcttttccttggttccctgggggtcccagcccattgcacagctatcttaagaaatacagtgtagattcttaggtgattggctggctggcagccagcagctctgacatagggctggtaggagattaactaccatgttgtttttgtgacaaactgagtgctagaacccatcttgtggcttgtcaccctcctttccaggaagcaacaggaagattatgggaggggaagtcttctgtttaggacatataataatgccgacactggtccaggtccatttgtcaccgaagtgatggttttcatggtcacatactattggcctcctcatagaaacaacaactacaacgacaaacccaaataattctccagtctgtgtttcttttgccttgtcagttatattccttcatccccctttttttttttatatcatccacggcttcctagaaaagaaacttctcgtccatatcactcactgtgaatgtgggtgtatgctgtagcattaaccgcctattttttttttttttttttgacaagaaaatcctgccatattgagttggtgactgctttttcctgtgtgtgtaggggaatgcaaacataagtttgggtgtactactttgtcttatttttaaaagtcagcctttacttttgggagagtagtggtgggtgggataatggtggtaattgtattgacgtggcttggatgatgaaggaaggaaattcttacatgggtggaggaagcggagaagacaggaaagagctctgctgggatccccttggctgagggaggaagaaggttaattctatcttttcacatatctgtcccttcattgcccccttcccttctctaagcagtcccataggtgttgaacattattgagtagacaccgctttatagccttgttcagggctacatggaaggtcttcttccatttgccttcctggatagcaggaagggaaagagtggaaggaacaaacatgtgtattgttgactgtccaaaaatactgcctttatactccgactttctgcttttaaaatcaagattttgcatatttgagagttgtgatggtcaaggcaaaaacagttgaaatattttgagatttttgccatagttgcttccttttgtagtgaactgggtaaatgtcctcaaataacttaaaacacctaagttaagaggcagcaatatggatacagcagaagcatagcgtcttgccaaatcatgaaaacatttaaatagcacggtaaatgaataagatacagtgatttacgttacctatgtgggaaatccagaatgtgggagacatgtaatgacatgggaaagagtattttctcttcttttcctccaaaggagatttgaattttaaaacatttaaaatacgtgtgtgtgtgtgtgtgtgtgtgtgtgtgtgtgtgtgtgtgtgtgtgtgtgtgtgtgtttatgttctgccttttgtgatgtgtctaaaacaagaatcccaaactctggaatctctccgtcagagtataacacaaactggtggtgtgtgggagagatcagataacactgggggctgaacctgtgacataccagtggcctgatgtcctttctaacaggagcagatgctgcttaaagcctgtttctcatggccaggtggtgcccaggtggaggagtgcctgtggcagattgtccaattttcatggaaatccaggtttttaagtaacttaacaaaaaccttgacaccaatgccacataggtcaaaccgatcctgcttgtggtttcccgtgggttcatgggtcactatttggaatgttttacgtttgtgctattggattgcatcgtgtgtgatcctggatgttcaccaaacaattagtatttggtatttaaattaacaaaatccaagcacaagttaaaaaacttccagttgattttgaagagcagcatctctgcttgtctttagtcgagccgtaagcacatatcatagagccttacagtgggctattaatgacaatttattatgtggacttgtgataattaatttaatagtccataggctatgaatgtacaagaatcagatagatcgaagtatagaatagaagctgtctacacggtaaaacagattaccaataagttctctgcttgtggcagcctcttctgtgtcaagcaagcagagaaagcacctgctttcagaaacaaagggctaacagttaaggtttggggtggaggagagagagaaagcgagggagaggaagaaaggaggttggagaaatggtgcagagtgtggcgctcttgtgcaaatataaagctctgagttcgaatccccagaacccgtgacgccagatgaaatagtgtgcatcgtcattggcaaggctgctatggagagatggaggcagagacaggatgcttcctgagtccttgccagtcagcccgccttgtgtacagtgtgcagctgtgaacagaatggaggctctttattaaggtagaaggtgaggactgaagccagaggttgtcctctgacatttacatatgtgctgggacatgcacgtggctgtgctcacacctaaccaatgtacaatacatatgcatgtgttgtacttacacaggcaaagtcactgaatacaaagtatgagtctgtgcgcagtcttgttctctgcactatgatttctctgacaggtttttctttttgaaattttctatcagttacactcctgcatttctaagtcaaaggttgccccatcttctcagtaatgtccttatgttcttggctacaagtgagaacttaagagaaaaaaaaatcctttcaagaatagtgaagggaaaaaaaaaaaccctactcattttaagaatggctgtcaaaggaaactaggttgcaaacagtcctgcagaaaatgtactgcaggaaaaccagccgccactgtgtccttggtaccttagtgagatcacccttgcatggtctaattgttgcttgctctagacttggttctgggttggagggagtgtgtgactgttatgcagtgtggaagaggtggtggccgttttgtatctttttgtatcttcataccagtattcgcccttatttcaagcagctcagaatggacaacattacacccgattcgaaacttgtttgttccccaaggaagagagtcaagttttctgggccaaatagaggcaaaggggtagaggctgtgtcattcccagaactcagtagttcatggtggaagtgaggcgctgagaggcgaggtacttgcccagggccttcaggggtagagttgaaatttgaattcatctctagttggctcccaagtccatgtccttagccacttatgcagatgtgtcccagcaccataaaaggaagcttcaccaatccttccccaatgtctgctctgactatgctgcttgccagtctgttccaagcagctgtagtaggattcggtgctgcccctatgctcattgctgccatctgcatagaggcagcaggaccgtctttggtagtagaatgggtacttttgttgtctgtgtgctgtcctgtagattggacttaggacctgtgcaagctagattctgcaatacagaaccattgaactagatcccagtcctccttttctttcgatacacagtcttactaagttgctctggccttgaactcactctgtagcctagggctgttcttcaccctataagctccctgcctcccgaatagctgagataagtctgagtcaccaggccctgttggcctgaaaaacacactttttgataagtagacctcctaccccaagactgatctggctatgtggctcaggctggtcttgagctagggagttccccctccttgtaccttgagtgtcagggttacagatatgtatcaccatggttgttccttttttccttccctcccacttgtcttcctccctccttccttttttgcatcatcttacagcatagctccaacccaccccccatacccagtatatgtttgccagattcttctaagcctggggttttgagctcagcaagctagtttcagggggagagactgactgcatgacttaattatctgataaaaacagatcaatacaaagtttcagagatttaactagaaaaaaaattccattgagggaactaagtgatgttggcatgttgtgcgtagtagggggtgggaaaagtgtcaggagaaggacagaggctgcagcccaccagtgacagggaagagacacagggcgtcaagggcctgtttttgttttctttttatgatctgatgatccctgctgctctgacatttttgtagtaggcaaaagttctttatttcattgtagtcttttaatggatcattcttactgtcctgtgtcctttcttgcctgtaaactgctcactggccagtcctacatttgagttaaagaatttgaagaggtctcttaacaaactggtgtatgagcagcaataggaacattgctgggttttgatgccaagtggtgtgtgtgtgtgtgtgtgtgtgtgttttcaatttacattgtggccattagggatacagtttccaatgtaaagacaagagagtgctgtttgtgactcttccttaattcttcgttggtccttatccatcctgccttacaatgagttcttagaacaaattcctcaaggccagtcccaatagccacatatcttccaaaaggccgctgacttcatttgtgattgaaatggaaccaaaccatgtaagtgcaaaccatctaccagaggtagaaagtcaaacgtgggctttttccttgttaagctttgtggaatgagtagcacacagagaaaatacttctgcactcagttcacgtcacaaagtcctattggcatttaaaatactggacttttatcagaagcatttaatgtgaaggatctcccatggcccagatgctcgcccagctaatagcccctctagcagggtttgctgtctagacaccccacccctgcccttcttgatcttgaccctcttcttcctttgtgatatatagtcctgattgtacctgtcacttccttgcagcaggttcttttctgtttcatatgtgacagatcctacccggtgagtatctgtgtcctgtgcggtgggttcaggagagctggagttcatgctacattccaggttgtggtcaacatggagttacagtttgtgctgtaatggctgtaacaggagcatgtttgggcacaatagtattgtgttggaggagaggttggtgagcttggccctatggctggtgtcttccaggtccaagtgatgcctgtttttcttctaggccgagcctctccagcctcttagagcgctgttcgcctgcaagattggggagaactggcctggagcactgggagcaggtgtcccggccacttgtggcatttgagatagaatgtcagtaactccattcacagcatacacaagtgtaatcagaaacgctgggcctgtggattcctgtaactcaaaccccagtcactgtgggactgattgcataggaaatgagtctaggaagaacgtcttatataagaggatttaaggtggttttcagtgacaggcttctagagagttttttttttttttttttcctctctggtgtcatatagacttaatagaagtagtgacccatcagtatggtgtgctcagatagcttgccctgtgtgcatagaacacctttcctccaggcacaggtgtgtaaattctcagaacacctttcctccaggcatgagtgtgcaaattcccagaacacctttcctccaggcatgagtgtgtaaattctcagaacacctttcctccaggcatgagtgtgcaaattcccagaacacctttctttgaggtatgagtatgcaaattcccagaacacctttcctctaggcatgtgtgtgcaaattcctacttccatttggccttagaatgatggacgatggaccgatctgaaagcagtggtgactagggactatgaagtgccccatgagctgttagtacatgttctacatgtcaagtgtggaacagaaagccactgtctggtgagtgcttattagtttcttagggcagttactgctctgatgttatcaaggcagatgattggggctagggatgaatcgctaaagctgtcgtggactttggtacttgagattttgcatgggattttatggtgggagggctgtagtagtgaccggctcagggcgtggatggctgttttatagatggtgccttggagttgtgagcagatgcatggaaaagacatggtggaaagccagtcattgctgagagggagtgctgctgactacatttaagctgtaattgaatagtgtttaactgctcttgaaacatctgcagctgtacttttttcccaagtgtattctcccaactatctgtgccagaggcatgatgggagaagatgatggctgctgttggctctgctgtgtgtgtgtgtgtgtgtgtgtgtgtgtgtgtgtgtgtgtatgtgcatacgtgcaagtatatgtgtgaacgtgtgcatgtatgtgtgtaaatgtgtacctgtatgaataggtataatctactcatgtatgcagaggatgtttgtcagtagtatagacttctgagccttacagtagatccaccatacatactggaacctatgagtacagaggctgcagatttgcatgttcgctagacatttatgtatttatacatagtggagtactagaataattaatctagaatctagcagtcttgtccacttatttacatgaggattgagttggaccggggaaagacaaggattttgaaagctgaaaacttaaaaaagatgggactcaaatttgtttgctgatttggaaaagagaggtgtacatgaacatgggtgatttttttttccacagtgtctttgtacagctttagttttaacacctcttggtcaatgttctgaactcagataaagatgggctctctgctggcttccagatgttactgcagcctctttgtcttttgtcagggagtagggtgatggcataggatagaggtagagttcttgttaggagaggtctgcttgaaatggaattggagtctagatgggctgtggtagattctgagccctcataggacatagcatccttctgcctttcagttgtgtgaacttaggtcttccctgcacatacaactgactaaacaagaagcctgtgagggccatggatttctaggtcactttaggttgaccttttattaaagtgagcacctaccaccagcgtcttagatgccttaagtcctttattatttaaagatgaaagctttgctatgatggcaagcattgaccagtttgaagaaggtggcatgcgtgtgatcaattgaagtatagctcatagttgaaatttcatggaaggtttaagttggaaggaatggcggatatcctctagtccagcggtgctgccgccctgatagcctgcattcttcatgctctgtcagcatcactctgtgcttcttctgtctgcctagttgacagtgagtgtggtggcacctactcggtagtgttgttatgggatctaatgagtttactcatgcaaagtgcttgcactatcactcccaacatggtaagaacttacatgccatagaaaggaggggataaaacagacccagagaaattatgatttgcctgaggccatgctactagttcaagactgggaaaccaggcctttgtctctataaactttacttgttagccgattcttcaactgtcaactttaaactgtgtgctcacattttggaagctctgcttggtcactgtgttcagactattttgagtcacaaagtctgattcaaatagaaaaagatgaagagaacctgtagaactcttctactatggtgttctgctcccttaccaagaaatgcagtctttaaaaccaccaggacaccaaaatctttggggacagaacatgatcgaaacaggcagaaaatccagtgtaaacaatggatgacagtttactgaaatgacctgtgtgtgggggggtatgggttactgtgacacaggtatgtgcctttctgaactttgctgtcagatttcctatggaagtagggtaaccatcagtcaccgtatcaaggtccctgtcaccatatcaatttgactggcacttgtcactgataataatatttccttaatgcctgatattaacacctggtagctgttttgttggaatcttcaaggaaaaaaacaaataatgcacatgtacacatgtgtacaaatttgtgactaagaatacatatggaagagagtatggagtgaatgttgctactgggaaccacagtcctgctgaactgtttatacctgccttgtttcctttttcctatgttgctaaaactttcctgtgtttgagaaggtgtcaaatgcttcctgctgtttatgtaaaattgatctgaaatttctactaattctttttgtaggagcagatggattttgttttttaaaacttatagcagaacataaatagtatgttggtttttttttttttttttttgccccatacactcagtaaacaccccatgccacactgtggacatttgcctggagctcactatgtgagactctttaatttctgtctgtaggatgaactgttttctttgctcagagaactgtctcagccaactgctgggaaaacctactggagcctgtggataggcagtgagtgtagggtcgcaacctgtactcagatatctgtatgacatttaaataaggcatttaaagttcagtttctctgccgttaaaatgggtggtggattccttggttcaaagatcaggtgcagattgctgaagctgacacctcccacccccattccataagcttcctgggtgtgtgctgtctgggactgcttgagctgtgtgtggaaacacagagaagatgataggaaagacagcttcattggatgcccttgggctgaggggttaattggtttgagtactgacactgcttataaaaacaagtaagtttgaactaaaagattatcccaagtaaaaccacattttatggggtcttccttggccagcccttaaccagtgttagcaacagatctttgatgtggaatgtgtaccccaaggcatatctatggttttgttagcattgtggtctctcttccagatgtggtcagaatggatctctggggcagtcttgaataacttccagaccaatgtgtgcatccataagatgcagtgaacattaggtctccgaggcctttgaaatccacaccattgatttgacagaactcagctcctcattgactaggaatagatgccatgtgccattgtgcttcaatgtgtggctcataccaagctgtttacctggggtgttctaggtgtggcgtttaagcagccagaggtaccttgctcccttctcctgatggtaatgtattcagatgccacatatagggctgaatgctatgtggtgcctctaaatggaatattctttaaattaaaaacctgattaaaaagcaatatgcaatgagagttcactgaatattaatacataattgccagccatctttgagtcccgaagcatggaggcaggaaagtagtttggttacagcagggtcctagaacggtaagctgtatttcatagaagctgtgtgacgtcttaacctctctgtgcttccattctcaagagtacctattagggtgactgagaaatagaaattggaattgcatctggtgctttctagctaccccagtcattaatggaaccgcagggccagcgaagggtctgttctctttctgttgttaactgtttctactgagctattgtcaacccctgcacttggagcaattcttcctgtgtgtcttttgatgcttggagatagaagcctcagggcaggtatagtcagggaccaacataaaagatttggcttcctcaggctggtctgaatttgtttcctacttcataatagaagcaggttgtttgtgctgtttgctttagctgtgccattgacatttatttacttttgttctttcagatttttaggtcaggttctgattcctacaataaaatgtgtactattttatgcatttcttgaaataaaacatgttttctccttggaatattttactaaaatgtttagctagcaatgaagatatttttttagcaacagtaaaatggtcattctttcccacctcgtgtaaataactacattgcttaaatattaaaagtgctaggcctttgttcatgtttttgagtaactgatattttttaaacaataagatgctaaaaattatttttctaagtgactaccaatgatgcttcttaattctgtaatttaaagtagatattataaaagactattataaaggcaacattcttcattccctttatgttccttgcacatatttaaaatgtttttaataatcaacagtaatgtcaaaactgttcacagggaacagtaagcctctagtgaatattcagacatcggaaaatgcccctctccccccagttttacccagtagtgtttgaatagtgtttgtgtttggatgtgcaagatcaacagcattgcaaagcatcccatacatagtgtattaatattaacttgtctcagatttcactccaagatggcagcagacaggaccacaaaccgcacagagcacagtagcagctggaagactgggtgacactgggggcactgggtgatatttctcttcatgttcttctctcagttcttggacgtgttgacctcagcctttaccctggaagaccagcaagcagcatttctggctgttgttttgaaagtgccaccatggattctgtgttgattgctaagcaaacaacaggatgaaatctaatgcttgcctctctatttctcgactttttttttcctcagtattctcaaaacctttaagtttctttgggaatttctggaaggaattactgaatggaaaaatactattttggcttcattccaagtgtacttcatgggtatgactaagtctgtgtggtcctatgtggtctctctgatcatgtctctgatggctgggtcctgagccccgggtccctgcattcctgtgggcacctggatccttttacctggaatacacatcccctggtgtgtctgtcccctcttttccctccaggacacacttggagtcccgtctggaatgagacgtttgatttgttgactgcccttgatgaagtgcagctctcaagcctgcctcctcccctggcacggccacatgccctgattgacaccattgtggggtacttctgtgctgtgtgactgtgcacatttcttttcttcctggccaggagcagtgcgtgttgcgtagtagagactctggaaatacttgctgaatgagtcgagagaatgagtacatgaggcttctcagggagttttgtacatgggagagggtgactctggcaactgaaatgattaggaggttattgtcatgccctccctgggatttaatgaaaaccaaaaccaagggcttggagaattaaggtcaatgtggtaatgtttggaaatgagagagagagggggaaaggagccaatctggaatattcttttctagcttgacaatgaggtattcttttcatgtaaccaagttaaggaatggtgggagaggcttcagtgtttattttagaaaacaagttgtatgtattaataggagaagggattatggtatttctgaatgtgtgttggtgtgcactacgtttgctcagacacccccccccccccatcccccccccccccacccccccacccccgccaacacacacacacacacacacacacacacacacacacacacacacaccaaattgctgattttactttgaggtcaagtttcctaaagtgttttaaaagctagctattcaggcaggctgtggcctctagggagttgatatctttagatggagagatttttttctgtatctgggaatcaagttggaattactgaatatctgaatacttaatttgctttgcaggatcttgagtcactaacagaattagtgtttgaaatatgaggtttattgttctccacttaccagccacttccattatagaaggataggcttggagcagaggcccgtctgcatcctgtgctcttcctgcatctctggcctcccccgaggcccctggcattgacatcgggtggataatatgtatataagcaccttatttgccagctgagttctgtcctttcgtttaagacattaaacctggggagatggtgggctgcattagatgacccactgagttctaagttagtgacttggatgattttcagccaatatctagaatcattgtaattaaaatgcccaaagttaatgtctgtgaggttcctggctgatttggttctttcctttctttggaggccttttttctcccctggtgcttcttaacctgccatgtgggaagcttgggcttttgaaaaggaaaggtgattgcgtgatgttggtgacatgtcctgtgtggccccattttgcaagtgtttttttttttctttctgtttagctagaggtatccaagacccagttatctgcattggcattctgtgtattctgtgttctaactctgaattcagtgaaaagaaaacatgagcacactaatgtagaagggtgtgcttgttgtgttattgagtgtaaaaagcaacttgcggaatgttttgtgggtctggaaaagtaaaatacatagggacatacaatgtcagaaatggtacatggcaaagggaatattcacttaatttgtatcccctagaacaatgcttatttattcactcgaatgacttctcaattttaaaagaaaaaccagattgttattggatgattttctagatgagatgtgttgaagatagactcagaactactccaggtactgctcatgggtggtggcagccggctctgagctggccctggaactggctggggttgagtgaggctgtccccccccccgccccgcccccgtttttggctttgcactctgccagctgtaggctggttccactagcatttgagtatttaacctctacttcttaaaaaccattagtgctaagctttttattagcttgggcttcttttttctgaactgagagtctgtataaagattttggtgtatcatgatggtctctaccaggaagccccttgtgtgtatttgtggactctagactatttgaatctctgtctatttgcccctgacaaaggaatgctattactgctctattatttttttaaaatgtgaccagcatcgagacttgttttcttgtacagttacctaattgggcttatttttgctggaacttggtattggtgcctgagacaacctagccagaggctggtcttccttccttccttccttccttccttccttccttccttccttccttccttccttccttccttcctccctccctccctccgccccctctctctctcttgtctgtctgtctttcctgggcagtcaatgtgaagccttgatatattaggcaaatactctatcattgagttttatatccaacccttgtgcatgcgtgtgtgtgtgtgtgtgtgtgtgtgtgtgtgtgtgtgtgtgtgtgtgtgtgtgcgtgcgtgcgtgtatgtgtttaaagacaattttgctatagagtccagggtggcattgtttttttttattttccatcttctatcaagtcctgccattacagtcatgtgccacaacacccagccaaagattcctcctgaaggttttaggcatcaagtctgagtgttgggcatttccagatgtatggtcagaaggtgagctgatgtttgctgtaggctgtgatgtgtgtggtaccttctgaatcatcagtataaactggtggtgttgtcaaatgtggcagtaggtggcgcttggggatggtggcaactagtgataggtgtggagacactttcatctcacacggtgaccttttgtcttgttgcttgcaggtgcctcattttgtgaactttatcagaatgatttgatttgttgctctgagcacaacttgctgttaagacaaagactaccgctatgtaaatatttgtagtttgtgaaactaaagatcaaaggatgaggttttgcttgaggtgaaagtaaatgtatcctcctaagtaggagtaattatcaaataattattcttatgtgttgaattttcactcactgagtactgagtatttcattccatttacatgtgaggcactatatatactgagtgactttcttacatatcacttttaattcccagagcaactatggaagcatcattaagtatcattctaccttccacgtgcgattcctgagtcacacagaggatgaacgcacgtgattaaccagtaaatgttagaactggacctgaaatccagctggttcaatccagatccagggcatttcgtcatcacttacaattattcttttaagtggatgatgaaccctccttaatcaaggttaattatgaccttatctaggacaaggctaatctgacttgatttaagaatatttaatgaaggtttctgtgaatcccagctgcgattgttgcactttctgtcaagtgattatagttggcggtggtggcctccggctggatgaactggagcagagctgcccagctccggtcagggccagcacagctggacagaggctgctgttgcaggcctttatgttttacaagctatgaagctcacggaacctcaaatacaagaagctgttcaacgtttgccttcattggcagctgttacagaagttgggtttggacccaaaacacaaaatgggaagcagtattactattaagtataaatcatttggccatgtggatcctataccaaatcacctcaaacttggcaacttaaccatcaggaatttgctttctggtaattctgtagagtacgtgagcatgctatggagctgaagtctgctatcagttttaatggtctgaagtgaaggtgtggtcagggatgcccctctcttcaggttctaggagaatctatccctgcctcttgtagcttgtggtggctgccagagtcacttttctgggctgtcttgcttgagtccctgtgaggtcacatttccttttcttcttacgtttggtatcaggccggtctctacatgttaaggtcacctttgatcgtatttagggacctacatggcctctccaactcaatatctttcacctaatcatgtttgcaaagcccctccacccaacaccttggcttgctgccctttttactttgtaaagaaacattcatagacattagggattgggttgtagttaccattccaaataggccattgttctgcctaccatgttgacagatagaattaaaacttttagtcagctgggtggtggtggcacacacctttaatcccagaactcgggaggcagaggaaggtggatctctgtgagtttgagaccagcctggtctacaagagctagttccaggacaggcttcaaagccacagagaaaccctgtattgaaaacaaacaaacaaacaaaaaccccagaaaacaaaaacttgtagtctgcccaatatgaaaatacacctaatttcaaaaattccctaactgctttgcaggccacagaaggtaaaaatgtgaacaaaccaatctgagaattattgggtaggatgtctgtctttaaggacattcacaagtcagcaaattcccactgcaaagaaagctgcttaactctgctaagttccaaatccctcaaacttggattacaaagcacttgtttttgaagggtccatctgttcatactcaagtactgtctaccgagtacttgagcatgctatggagcgtaggtggagctttcactcccattagtatttctaaagcatggcgtatatgttgctttaggacttcaaaaccaagacagatatgcaaagttaaacggcatttatatccattcattcattcactcagttttggacacagtcttgcttgatagcttaagctgtcctggaacatattcccagactggtctcaaacaattggcagtccccaggcctcagcctcttgaatttgagaattatagatgtgaaatccttgtcttccaatgtgtgagttttgatgttgtgtctgatgagttttaggggttaaaggctatgagttatgaaatgtgtggaattgttcaaacctggaatgatctagaggatttctcagagaagggtgcttctctaaatgaagggcatccattggggaacaggtagagaagagcaagggataatgttggtgtctaaggggtatgggcccaattctctatgacagtgattggtccaaattcaggtctctgtctgctttcctgaaaatgattttattgaaatataggcgtttctgtttgcagaggttggaggcttgcagagctcccaggatttgccatcttggcattcagataagaaatttgttgactctgaggacttttatcacggatgtgttatccttgaatttttgtgttagaaaatggacctagtcaactgtatggaaaatttattggaaaagataaagactgggcaatgcagcatgaatagtagagaggggaacagtggagtttttggctatagaattattactacagtctgagtatggggtaaggcaggatggtagagtcaaagacagttttaaaataagttttaactttctaatgttagtactgcatgtcagtcacaactaattgagacattataattaattcaaatcatattttatttagctttcctactttttatatactgttctttctctgctggctaacaaccggcactctgctgtgtctttggacttctagactgtgactgattctctctctctctctctctctctctctctctctctctctctctctctctctctctcctcgacagtgttgaggagtactggtcaggttttgtagactgtccttcagttgagattggcctcaggatttcctggttagattgaagttgttttttcaggatcagagaaaaggtgttcttttcattgtaccttttcagaaggagaaagcaacatgcttatctctgttggtatgacctggatcactccagcaagtcgagacagtgctaccaggtttctctgctgtcaagtagttaggctcagatgaagtatctatataaaatactttgaattcttctatgtaggacttctgtatactatccatcatttatttaccatgccatttatacataacagtatggattcatggataatttctacttaagttataatccactactatgtgcttttatttgtattgcccaagatgttccaactttggtcattgggaggtcattttggtggttcttgatgtaccccattgtcatggatgtatatgtttgtatgcatatgagtgcattttagatctttcttccctttacttcctagcattatatgatgcttctgaaacattcaaacatggccatgggcttctcagtttctttacaatagctatatgtatctagtaggattatagcagagaagataaaaccatgagttgaaagccttatacaggggatttactataaacaaagtttgtagcctgtttgcaaggtacccagataattgctggttcacacttgagaaggagtaaggatgtgtctgcttaggctttaagcatggtgtgatggaaaatcttgattgcccacctgactaagtcatcatagaaacaaagcactgggtttgtctgtgaggaactttctagattattaattaaggtagcatgattcatcctaaatgcgagaggcacagtccataagattggggctcaggctgaataggaaggagacaggttgctgagcagctgtagatacagtttaagatagctcgtgctcctgctttggtgccttcgccactgtgatgagcggtgtctggaaactgcccagaatataccctcccttcaggtgtttttttgcaggttattttgtcacagcaaccagaagaacaactcatgtacatttcattgcaactttaacattcttatcgaaataccgctatagaaaagaaatcttgtctctatgtaggcaattgttatatcaaattttatcagttatactggaatttgatcattttggctggggagagacttcaactagcctctggaggtagagttcctttccctttctagggtctttcaagacaaggtttctctgtattgctttggaggttgtcctggaactcgctctgtagaccaggctagcctcgaactcacagagatcctcctgcttctgcctcccaaatgctgggattaaaggcatgggctcattttttttttaatgtgtgcgtgtgtagcctatgtttaggcatgaacacaccatgttgactatgtggaggtcagtggacaatttgtaggagttggttctctctttccacctggtcctgaagatgatctgaggtcattaggcccttccctctccttattctgtctctggtatagatatgatagaggtttggctggagggaagctttggaacgaaggaagagcgttaagagataaggttgtggccagcagtgctgtccttgagcaccaggccaaggcattttcagtggcttgtgtgtgtaggagtgatgaaggctaatctcttttatggctcacagagaagagttggagtctgcagttgcttcccagctgaatgtagaaacagcagtcagaggaatgatgaagaagagaggacataagaggccattatttgcccagaaggatttgtgcatagattagattctttcccagaaaacaagagaggaattagtgactaagcagtctgcttgttaataatctcaccaaaaaagaaaaaggggcttgtcttaaagtatgtcccctgccttgccgtgctttttactgttactgtttcctgttcttgagaatattaattggaaggtagactaactctgcccagtttagaaagtcatgtaatccaaattaatggagtctcaagttttcgtttcactgtttatttatttatttgtgtttctcctactatgtagagttaaggatgaccttgagctcctgatgtccctacttcccatgtcctgaatgtaattatattttttatacttgtctccagttaagttcaactgaaagattttagtttgctgagagaaaaagttttgaaagattttagttcacagagagaaaaagtttcccatgggccttggcccattacaaggaagttggccccaaccccaggcacatcctatggtttagacaggggcaatcgccaagacaatcctctttgggtcacacctggctggccaacagacaatcaaggactttccagggtacgttctgtggtttttcctttgtagaaaagcaggtcacacctgggtgaccactctaacatgagatcatactttgtaatcaatcactttgtgccccttgcctgtatgctgatcttcggttttttcctatataaggagcttgcaccccatgctggggtgtgcagcttccctgatattgctgacaccgaatgtgcattcattcaataaaccctcttgcttttgcagctcttggtctggtttctgagtctcgggggctcctcgggatcctgaggcccttaggggtctgggtgtctttcacaacattaccttctgttgatcttacagtctctctatatggtggttttatgtcacttttaacaagtgtggtacttctgaggtcctgagaatgacaggggattgtcagagccctggttgtgtagtgagtaagcgtgggatggcctgttcctcagtggctgttggcatttttatttctgaggtctttcatctgtaactggaggatatgtttcactgtggtttcacctttctgctttgtaacattggaagcaaagttgctgtggggctttcccctgacagtttaaaattattcttttattactaaaacactgttggaccaaatcaccatttgaggactaggttctctttgactgtgggagatcagccagtgtcaggtgctatgtgtgactcctgttatttggtttactggagacaaaagagctttcctgtgtcatgcttcattttagttctctgcgagtgaggaagaaccaatttagcccagtggtgtggccttgtttgtctgctagccctgccctgtcaactaggagtatctactgggcccacttctgaatagctgtactcatttggagggtaaacatttattagcttgagaggaattccaagctgatattttagttggtaaaattcgggcaaaaacactgcttttgtgaagttctgactgagcgtaagggttggaagatcagatccctccctgtgttctaagcagagtctcttgttaagtctgcttttcaaaaccctggctctgtgggtttgtggctgtagctgtgtgccttgttctgttgcggtggctgctgcttgttcagcaaggagagccttaggagcagaacacagggggaagaatttatctggactcctctcatgtgaccctgatgccaggactgccaacctgggcactggctaacattctccttcctgtggaagcctggcagaagacattagtaagtcatggtaggaggctgcttgcctgtgatccagtgaccttgatactcaaaaggtcaaagcaacccatatattgatctgtatgattaaaatttacattataggttgatcacaaattggtttctgtcaaagtatgttgaatgtaattatatcaccctgtactgggataagttttactttttttagtatttttttttatcctcatgatcattactttatctacatttaagcatactgcaggggttctagttttcttttagtgttaaggtaaaccagttttaagaaaagatttattatatgggtatgtatgttgggcctaagtgtccatgtgtaaaccacataccatgttccatgggcacaggaactctggcattccctgtaatgttataaagccatctttggggctgacagtggcattctctatgtgtaatgtagctgccttgctgtctccaaagctatatgctaataacaagcttgatttttatgttcggatttttggctcctgccaaaatcatcggtgtctttagggcttttcaaaacaggataatggcatgtgtcaatagaggcaacagaatttcatgcctgcttctctctctctctctctctctctctctctctctctctctctctctctctctctctctctctctcttatcgccataggtcaggccttgagtcttagaacttaaaaatgcttcctatttatttcagtttctctcattgtgcttgtgccaccagcacagactcttagattccatgtcacaaaaatctcgtggcactcaaaagggctgcacggtcctgcggcttgttcccaggaggtggcattttacctggagagagaaaactctggtggctgaacctgttatttgagtcaaatcctcctttgatggcttcattctggctctcttgtttgcatttgatacaagtgactttctctccttgaacatctcctcgagcagattgctcatccaggggtcagtgtctttattttcaaggctttagtcacatctttcatggctgtgaacttgaatataacttctgcatggccagaggccacagcgagctgagtaaggcagtcactgttcacacaggcaagggacatgtttggagggattcaaggtaggcatggagccagagctctgggtgtctttcctcgggatttaaaggtacagcaaatagtaagtctccaacaagtgatggaatgatatgcatgtatcgtattttaccaggcaaggcactacaatatttcttttcttcttccttccttccttccttccttccttccttccttccttccttccttccttccttccttcctttctttctttctttctttttaagacagggtttctttgtatagctctggctctcctggaacttgctctgtacaccaggctgaccttgaacttacaaagatcctctgctgcttgcctacacagtgctgggatgaaaggtgtgtgccaccaccacccagctgcaatattcttcaagaaatattttttagccgggcgttggtggcgcatgcctttaatcccagcactcaggaggcagaggcaggcggatctctgtgagttcgaggccagcctggtctccagagcaagtgctaggataggctccaaagctacacagagaaaccctgtctcgaaaaaccaagagaaaaaaatattttttagtagctaggtgtgatggtacatgcctgcaaacctattaattccactagactactgcagggtggtcacagaggtgaggtcttcttgagctaaactatatctcaaaacaacaacaataacaaaacaataacaaacaaacaacaaataccaaacaacatccccccaaagaaaaacaacacaaaactgaaaaatgtcaatagtgggagcctggtttgttgatttaagttgcagtgagatcttaaaaataaagctggaagaagtactgacatctagaaagtgagaaccttccatgataatatctttgttgaattaactttcctcttgtctaggaattttttactcgcataaaatttgactggaagatagaagataaagaacaagtgtgtgtgtgtgtgtgtgtgtgtgtgtgtgtgtgtgtgtgttttatcttttttctgcagctgaaacatgcttttcatttagttcttccctaaatcctccatcctcagttggtccagttctctgatggctttcccccaggatatgccctccctcttcagagccagctcttgctctgctcccatcctgtcatctcctgtatcctctgcagaggcaagtctgtggtgattctacctggatcttatagtaacaagccccactaacccctgctcccctttggggtctagtcacctgggtgacaacagtaagatgttcctatcccacaacccaacagaaaacaaacctccaacacccagcctgtcctcctgttcagtacttaacttaccaccatactaattgaaataatgatttcatagcctcggaatctcacgtgacctgttggttacccactcttagaacccatggtctcctgcccccattttaccttgcttggattcagccgtcgtaacttgatttcagttcctttgaaatagccccacacttctcctttcctgtctctacttgtttagcaatattcctccttcaattccccattaagttccacttctaaggtcttaggtcagaaaccagcctattattgcaccacacccagcctctggtaacccactgtattggtatatagagtcattggcatgagttagatgcttaattctatttcttgagtgaagaagtgaaagtaatggtatttatgaatattttaagtgctgcttaagaactctaacaagtggcccatttattttgtgttgcccatagctaatataccacactattcccccgagctttcatgcttgccctctcaaagctgtttctggtccactggattatctaataggcctgtggtatggaatgtatcttgtctttctatgttcagcagctggagacacacagccttctggatgtttaggtgtttagcctcttttttttttttttgacatgttaaccagtttattataggccctggcagagtagggagactaaatgagaagaggaacagggttaatggctgaccgccatggccggtcgccatagagagacagagagagcgtaggtgggagaagagcagagcagagagagaagagtagaaatgtgtttagcctcttatgttgccttttaccttttctttttaaagatttattttcttattcttagttctgcatatgcatgtgtatttttataggacagtatgcatgtgagtgcaggtacccatggaggccagaagagggtgtcatgtccccctagagctggagttacaagtgattgtaagccacccaaagtgggggttggagatgaacctgggtcctcggaagagcaacgatcattcttagccacggagctatttccaggtcctatactgaccattaaacacgtatcaattccttattccttggattttatagcaagcaataagcatcattagatggtaagatgaagatgacatgtgctcatgaggataaagaaatactgaaaaaagtaaaacttatcccaatgtaaagttgtataattacattcaacacactttgatagaaatcaatttttcatcagcctaaaatgtaaattttaatcatataggtcaatatacattttaataattactttatctgtatttgagcatacatcagggcctctagttttctttcagtgttaaggtaatttttaaaatcaatttataacaaaagatatatgtgtgtgtgtgtgtgttgggcctgactgtctacatgtactatatgcatgtaggagccttcagggatcctcgggaagtggagttggagacagttgctttcctggggtcctatgcaagagccacaagtgctcttaatctgtgagccatcactccagccccaggttcttattttattcttttaagttttagttcgttttttaaggtgatttttgttgtttccttttgacttacttaattttttgctagtgagaagttttcttgtttttctgtcaacttgaaacaagctagagtcatctagaaagagggaacctcaactgagtaattgcctctgtcagattggcctctggggatgactgtgggacattttcttgattaatgattgatgtgtcaaggctttgcccacagtgggtggtgctgcttctggatgagtggtcctgggttacgtaagaaagctagccgagcaagccatgtgaagcaagccagtgagcagcattcttcatggagtcagttcctgtctccaggtttctgccttggcttaactcattggactatgacctgggatgtgtaggccaaataaacccttttcttcctaagatgcttttgcttgtggggttttatcacaacgatagaaaccctaactaagacatggatccatctcaaggtaatagaatgtaaactgtcatgaaaacgatgtcagctttgaacttctttttgggtgtcattctgttcagacatcaatcacctgtatcagaaacatgtggcagaatttcagctgcagtttcctacctctactgcttattgaaacatgcacgtgtcgagttccagaaatctgccttttatagttagcacgttgtattttcagtaggctccagaagttagagagccaggtcccatgtgtgcagagcattgctgctaagatttgagcagggtctagatgaggagactcaggtacccataaagttgtcatctgaaaatttccagtgctgtcagtaaaaggtgacaatactgattgtggctaagcttgaacacagtcattgtccttttcagccagagtacagatgatcagcacggagtcctgttctcaggagaacactggccttcagggcactggccttttgagagtgatataggcaggaaggaacggactgagtctcctgatccagccaagttcaagtctccaggaagtcctagaaataggcggttggtggtgctctcatctttactaggacttttactctcttctagccctccctagacacccaggcacaaagagctggcttgtcttaaacagggcaggagcaattgtagtgttcttggcattactgctgatgtggttaataccatttaatcctagcacttgggagggagaggcaggtggatctctgttgagttctagaccagcctggtctacaccacagtgaattcaaagccagctagaactatatagtgagatcctgtctcaacaacaaaaaaagaagcagtcctaacactagctttcttgttagcccagctgtagcacaaattctaattggtcttaataataaaaacccactggagtcagatattgggataaatgctgaaaaatcagagacgtaatggagcagccacagccacttcttacctcaccaactcctcagcctgaaaggggccaagctcctgtctcctcccaccttatagtcctctctcagcccagccctatcactacctgtctgtctgtacagaccttcagatctctatggttaactagtggctagctccgctcttggattttcaggcaatctttatttcttagaatacaaacaagatatcaccacaccaagctttggtcttacaagctcttgaaatcaccccagagaaggggggaaatacaaggtgtggagaaactgattcacaacaggttttgttctggactggacttctgaaggacccagatgtcttctcccattcatagcagagatcactcagcttcttcagatcacctttggcatataccttaacatccatgcctggatatgtatttaatatatatatatatatatatatatatatatatataatatatatatatgctaatatatattagcatttaatattctcaagtgtagaagggtaagtgtcctgcagtccttgggacagccctcatcaataatgaatggtacctcatctagaatcatggctttctttgtctgtgtcttgtcctatgcttcctcataagatgaagcgacagtgttgctcattgggtacagtgtgggcctaattatgggccgggaaagcccagtttgaagccatcttcttaggtggtttcaccgctctgactgtgtcgtttcttttgggttctccattagatttaacctaatgtgaaacagtgaaatgtgagcaggagttttgaccaagagaatcaacctgagctgtttcagtcccacctagaaaacatttttccaaaactgtagcctattcttgcactggcatgcaagttctataaaaataatcagggtatatgctatgtaaattaagccttagcatcacaggaggagacagggcccccaggaatcccagtgctgtatcctgaacaccaccccaagtgattatccttagcaaagtgggaaactttatcatttgaaacagttttttaaactctgaagcttttgaagaaaagatcacttgcccaagctacaagaagggtttgttctgagaattaaataagataagcagaggatcctgggatatttgctggttaatactggtcattcagttagaaatatgactgggtggtggtggcacatacttttaaccccagcacacagaggcaggtgcatctctgtgagtttgaggccagcctgatctacaaagagagttctagggcagctagggcctcacaaaacaaacaaacaaacaaacaaacaaacaaacaacccaccaacaaaaaatgttgggtgtggtggtacatggcctgtaatgccagcacttgggaggcagagacaaaaggttcattttcacctgcatagtaccagctggctttggctatgtgagatcccgcatcatgacacagaaaagatgccatatgttatcaaaggatagagatactacattaagcagtatagcttgttagccagagatgatgagctgactacgagatttgaataatttgataaccaagtacaaatgtagccaacagtaaaggcaccaggaacagactaggaaaattcagccaaagttggttgagaaaatatgtagatgttgagatgactcaggcagctgtttccctaaaaggcctcttgtgaccaactgagaaaccatttgttgatcctttgactccagtgagcctatttctagtggtgatttctatggaaacaattatctccgaaaatgcatagtaaatatgggaagtgacccagatggcttctagtatatgctccaatttgtttgtataatagactgttgtgcatttgtgctggtgatgtcatactggcaaggcacaaagtgtatgataaacacactgtaataatcatgagattaacattgctgtcaaggagctgtatgagcacagggcttaaagacatccctcaaaatgttcactaagatcttcagtggaattccatgccaggttcttctttcttgggctttattaattatagagctattcatgagcatgagggattgtttctgtaattaaagcagtttactttggaaagcaaaaccatattcaaatgtatgggcaatttggtacctttttactccaaagaatctgataaatctagtcctattatttaaaaacaaagaaatagcctgtcatcttaaatcgtaaacattagtggttccagggagctatttgctcctcccaagtcaatttgaacagtgtttgcttaggagtgagtgtgataggaggagaacttggaccagttcatctgtggcaaggaagaagagatgttatgtagtccaagacagcatagaaaccacaccaacacagcagcactgtttagtttgaaggtctgcccagaaaatttgagactgagatgtcattcatccacacataggtgtgcagcccagaacacccagtatgcctaggcttgacttccgtgtcccagaagaagttgattcaggtgtgagaggtgtcaggtgctgaagctggctttcagaagtcggattgctagtctaaggcctgatccatgaagccataaggctgcatcagtgaactggtccattgagcagacaggtcttgcatcttttgtgctgaagctgctagagcatgcctttatttccggcactcgagaggaagaggcaggcaggccaatgtctgtgagttcaaagccaggctggtcttcatagggagttataggcctacatagtgagggctacctagtgagaccagagagagagagacagagagagagagagagagacacacacacacacacacagagagagagagagagagagagagagagagagagagagagagagagagactaactttgattttatgtttactacaagtctgcctctcccctgtaagtctgggtgcatctgttcaaagatcttcattcaagctggagttctgtgagtgaggcgtcttgggcaatgctggagtttttctacccacaggaggctcactccctatctcagctttctgtggtatgggtggcaatatacatcataatgacaggtgtttgtctaacatgtcatcagcaacttgccacactaagtctaggattctgtttttgttttaaaagtctcagatgaccaaagtcgacaagaaacataagaacattcgtgccttcaatgattcctaatttctacagtgaatatgtacccctgtctaaggcttacctcctccaaagtttttattaacaaaacaatgagtgtacaggatttccaggccacttcctcttagaaagaacagggtggggtggccagtacaggaagggcccctggtttctatgtcctggccctgcctgtctgacctttcaagctgcagggaggcttctgggtgggcagatgtagcttcccagccggtgatggttctttgcctactctttggacccaggaacacagggtgatcagtgtgcctgggcctatgggccagggacagaattgggtctagtctgggagctgacatctgcagggtcatgctttttggctgctgcgattctattggtgctgtgacaaagaatcagagtctggagtctggaacaatgagactctgaaataagacttgatttcttgggttccattgttggaccacaagcttggagatcagatggatataaagttgtttgaaaggagatgctttcaactgtgagcaggagaaatagtcttccctagggaagagcgcaccaactggttatccagtacctaacagtgattaatgaaaaaagaggtcttgaatttgaaagaaagcaaggaggaacattcggggagtttggaaaattggaagggagaattgatataatccccaaaagaaataatcaaagcaaattgtttgggcttctgattaggagcagaacaaaacaaaacaaaacaaaacaaaacaaaacaaaacaaaacaaaactttgtaataataggaatgataacttctgtggccagattttgtaactgaaaaatacatttaaagtgtggtgttggggatgactgaatacaaagcatctttgttgacttatgtgatggcattggcaatgcagctcaagcaaagctaggttccgagaggtaggcagcagtcttgtccatctctgaggcttgctatgaaactgaaggctcttcttgtgctgcaaattcttcatgccccaaagctcaattaagtcctccattggtatctgataagtgccagtaggctgaatataggcttttacccgggggtgaaaatgaaattgtgttgagttcaactggaacaaggaaattgtaccctttcatctaatgagacccatcatatgcaagaattaaaagaaaataacagtgagacagtgttgtagcttggtagagtgcttggtagagttcttgcttagcttacatgaggccctggctgatcactagcactgcacaaaaccaagggtgggcatgtatacctgtcctgacagcaactgggcggtggaggctggaggatcagaagttgaaatgagataatgagaccattcctcaaaatcaaacaagcagctaagaaaatgttttgactactcccaccccatgatatcggtagaacaaggctgaacacactactcggaaagtaattccaaagagggcattaagaattaagttacagtaaggtatatataataaatgaaatgtgtgtaaaaccctttttgctttctttctgatgaccattcttagattgtagactcctattttattgctaggctgaacctttgaaatgaaaatttgtctaactatttcctttcatagatgtaggaatcaaggccccgagagggtgaccttttgacctgacacatcgttatccatcattttccacagatcctaggcttccagatgttttcactgaacatctcaacaaagcttgagacaccagattccataggagttatgttttcaggccatatctggagtcacaacagcaaagggatgtaaaagaccgtgaacattattcttgccagggcccagtgtcctcaacctagtatggggttccttagcaaacatttgcttactgcctcagaatagccaaggtacaacacaaatgaccagacactaagatgacactggtgttttcaatagagaggatttcaggatgtctgtgtgtctacagtgaactggaactctcggagtccctgaggatacagaagtgaccaagactggcatgcatgactgtcatttttctaactttgtttcttttcctatgtggccatatctgtatgtttgaaactttaaagatcatttatgtgttctttgtttagtattgtatcttaattatttttgtgtaaaagtaatttttaatatttgcacagtattctatgtggttgcttcttaaattcttaagactttcttttttgcaatttcaacaactatggaattttcaattttggtagtagaactggatcaaatagtaggaagattcataagactctgaatgcacaatgatagcattcttcctagcataggtcttattaatcttattttattatcattcccattgaacatttctcaaagtgctgatttaatgggaaacatacagtgttgtttctggttcatgtctttgttgcttggcactatggctgcactctgtgcccaggtgggttgaaataatgactcaggcattcaaaggacaatcaaaggattcagtcatcagcttatcctcttgtcattgtaggtccaggaaatccagacctgatccatgcagctatagagaaagatggctctgcctcgtctagaatggaatttaggcagatacagatgcaaccataaaccagacccccttggcacacccggagcttaaaacagctcaaattgattcatgatgcagctgtatgcctgactgtaactaactcattccccagcaggaatttggtcttggagtttggctttcaatgttgcctctcacttgaaaactggttatggagtctttgtctctcaagtccaggacctgtttgtttgcatttgttggtttcctttcttactcatttttcctttccctttcctcacacaacttgttattctgtagccaagattgtcctcaaacttgatcctccagccttagccttgaagtgctgagattgtaggcatgtactaccatccctagtttcagtgtcttcacttttgagaacaaacatactgcctaatggttctgctgctctgatttaagtctatttgacatatcccaagggctcagtgttcacagacagtaacattgttatagatgtgatactcaaaaatgtgccctctgacagtgggtaactatgcaagggcctggtaggctgagatatgacttgtacgtcagatgtttgggtgtgaggagtaggcaccatccatcagccccaattgtggagcatgtggtggaatgagcatataaagaatttccaatttaggaaaaccccagtttcaatgatactgtgggatcccagaagactttctggaatcagccccagtaatcactgaaggagcacacccatgtgagtgtttacacaccaaacacttgtgctactttccttcctcccctccttctcgtctttactgaccataagttggtgtccacatatgctatccagaagattcttagaataatcaatagtacacaaactgaagttaaaggagatagtaaaaacagatgtcctgttagaacattgggtggatgcagcatcctgaaaaatgagtgtcttttaaggcttctcaacttcaatagtgcttttctgttaacagaaaaagaaaactttgtccttctcaaaaccctcctccttagtttatgctcatagctttttagtgatgccacttgacacttcttttgcccacattttacgggccaggttacaaagggatgccatttctcagtgctgaggtgaaaactccatataatctagcttgggtcagaattctgtggcctggtctgtcgccctttctgacttgccaaatatttagagcaattccaatgtaaagtcataaacctcaccttatgcttgggaaattagtttcattttataggatggccgtttttgactattccaagtacatacacgtcctttattgtatgttgtctgaaatattttttaagttaaaataacaaactttattttttacatgtgtaatgtatgtttgtggtgtgtgagtgtgtgttgctgtgtgtgtgtgtgtggtgtgtgtgtgtgtgtgtgatgtgtgtgtgtgttgctgtgtgtgtgtggtgtgtgtgtgtgtgtgtgtgtgtgtgtgtgtgtgtgtgtgtgtgtgtgtgcaggtgcatgtatgtgggccatggaggtcactggttgatgtgagagcttcatccaacactctgactttgcttactgaggcctggtctcttgctgagccctctttgcctcttgggcactgggattgcaggcaggcagtgaggccttcctgacttttatatgtgtgctggggacctgaactctggttctcatatttgcattgcatgctcatcatcttctgagccgtcttgctgtccctcaacaacacgaactcttctttcaatgttatatgcacttttagttagattttacattttaaactgtctcatatttgcaaaggagtatgttattctttccaggcatcagacatgtatacaaccttacaacaacatgaactcttaaatggtgataccctaattttagatgaatcatacatttggctgtgtctttaagatttttggatagagaaacacacgctgtgttagttgacggttgggaagcaagaaatttttgtggaaagggccaaaactttgataaaattcagtggaacaggcaactcatgtgctgctatgtggctgaccattaatgtcacaacttgcttaactagtgcctattagagaagtatgcagtgagaatggtgaccgagtgaagagatggattggtgtggtgtttgctttaaagttaatgaggatcagacaaggaaattgcaaaggtcattgggggaaagcctttcttcctcactaagtaaggttgaagtgtaagcaggattagtcatcccctcctccccaccgtcccccacttggttctgctttgccaagagctttaattgtatggtattgtaattatctgtttatgttctctctccagtaaactagctggcccagtcttattcttctctgtgccttttgcagaaagaagcacaatgctagtagattgtttttccacatatgattcatctgtctgaaatcgtaaattagaagacagtttcggcctgtaggtatttcaaaatattgacaaatattttgagtaggcaaaggggcttggaggcatttttacctctgagtgtaaaatttgttcatttaaaaataatggtaggggctgttagatggctcagagagtgggtaaaggctcttgctgagcaagcctggtgaactgaattcaagtcctagaaaacatatgaaggtggggaggagagagaactgactccacaaagttgccctctgacctccacacacgtacatcatgcacacaaacaataacaaaaagtgcaataataataattcagaaaaatctgaattcccatgaccccacttttctatgactattacattcaaaagaggagttggatctgatactttcctggcagccttaactaatgtttcctcacaccgcctttcacttgcctcttcttttcagccttttgtgacttggtgtgtgtgtgtgtgtgtgtgtgtgtgtgtgtgtgtgtgtgtgtgtgtacacccacattaactgaatgctgacagtccatgtatctaaggacacagcagtgatacacacatgggctatacgccccccccccatccatatcctggagtattagcagaaattagcatcttagaattttcagagtcagcttcgtctttgtccttcttcttaaggctagctgacacacagacccatgaacaagttggagagttgtcgaatgtcccttgtgctgaagatgctctggtttgtaggatgtgatctatagtagacactcactttgataggctatgtctcatgacttctcagtgattgggactcaaggtgcagcacacatcagggggtgtagaaatggctggcactggatattgcccagtaaatttgattgaagcaagggaatgctttgtggaatggccatgtgacaacgtgatacccccacccccattttggccctgatgatggcttcgccagtaagtttgctagtttaaaatatcagtttctacagtttattggcagcataacctggagctagtcacttatgccttgagatgctcagaatcctctcctgtaacatggggacatttgttgaaacctggatggttttgtgtaggaacccatatttgtggggctatagttggatctagacaacttgcctggtttgtacctgagaggggcagtgtggattgagaaacagcaggtaaagacactaaggaaaagataaaaatagtcagcaggacaatccagtgaatactgaatgcaccaagtttattcttcaacattcttatataccccaatcaaaatggaaaatggtatctttatcatgatacaaggaacaaacagattttcttaattctccaaacatttagtaactacaccttagactaaatctcttgttatttagataagacatccatgccttaaaccaaacaccctacagtagccacatcttagacctttaggtcttatgcctttaatcttggaagagtaaagatagttttgaactctctgacctgaagtcaaaatgcagcggagccatttttatggacgccaacatttttgaagagtgaataacagctgtgaaattcctgttcgaggatgaagaattagagtagccttaaaacacaatggctgttcttaccactctgcatgaagggctttctaattctccagcatcttgtttttttttgtttgtttgtttgttttgttttgctttaatatcccatccttattggtatcttaatgagtccacattttattcaaattcagtaaatttaatctttctcagaataaatgtgtctacttgctatttttcctgtgtagcttagaataagttttgaagcagaacaatagctgtctgtgtgtctctgtttgtgtatatctatttatttttattttgttcaatgtttaattccagatacagatctcattctcccatccagttataaccttccacagagcacaagggtctgtttgtcattggctaccctagaaaagaaacccagatgtgtgtaacttcaaagccctggttcttaaaacaaaacaaaacaaaacaaaacaaaaaaacaaccaaaaaccaaaatcagaaactacttacaattttttcatgcagtatgttttatacattgagcatatccctcctagcctcaccctctccttctcacgctttctgcccttcctgctgtcctctttgttacctagacagtttcccctcagcgttcattttatatattcaggcataactttttgtgacgacataaaatctaggaacagcaagaaaacatatttgtttttctgagactggcttagtccatgtaaatatgattatctccaggtgcattcattcttctgcaaatgttgccaatggtccaactccattcttcttgatgatggaaaataattcccttctgtatacatctgcagttttgtccaaccattcttctgttgttgggcatttagcttggctccataatttaacggttgtgaaaagtgccatgacaaacattgatgtgcaaatgtctctgtgataaggtgactgagattcctttaagtaaatagccaggagtggtaagcctgcgtcatttggaagatctgtatttaatttttttgagcaatctctgtacctatttgcataatgacgagacaagtttacattcctaccagcagtgtgtgaaaggtttccctttggccacatccttgctataatttgctgatgttttcctaatgactgtcttctcactggggtgagatgggatctcattgtagttttaaataatggctaataaggttgaacttttttcaagttctttttaaaaatacttttcctcctgtctgtctccctcccaaattcatgacctcttctttagttattactgttacatttatatgtacctgtgtgtgtatatatacacacacaaacatatgtatgtacaacctgctgtgtctattttgtattgcccataagtatacgggtccagggatgaccacttgccattggacaacctatgtaggagcttgttcctgcaggaaaatgattttttctctctcagcagccattggccaaatgtagcccttcatctaggggtgggtacttgtggaatttcccctgtgtaataggaagctttctccatctatctcggtcccattggaccagtttctctctatccaccgggtcccgcagccacttatgaaataaccacccagagacttgatatatatttataagtttttggcctttggcttaggcttcttactggctggctctctcttaattaacccattactattaatttgtatatcacttgacttacaggtgatgcctgggtctcttgacttcctggcatggcatctgttccttatcttcctttttcctctttctttgttcagaattccctcttagctaagttttgcctgtccatttgccgaaacagctttattcatcaactaataaggaaaactgttacgataaatctttctgccaaaagctgcctgagccccaccgccacgtgtgagctttatgccagttgcccgcctgagtcagggcccaaatgagtacacagaaacttgtattaggttcaaagctgcttggccaatgactaggattctcatctgttagcttagtcttaactatcataaacctatatattttataagacttatcttatcggacgccttattggcgtccctccttgttggtggatcacattgtgccgctggagcaggagcagaggggaaaagggacccttcctgtttctccttcacttaaaaatgactctccttgctatgtcacttcctgcctggatcaccacttatctactacatttcccagaatcctctttgactcctagtcccatctaatctgctgtcttattggccaaacagtatattatttaacaatcaataagataaacatacacagtacattccccatcataaaacacatagtcccagaattcagaggacatcccctatcacccctgtccacattcatatgccaactggtagtgttattatgatggtgttgttcaggcaggaatattggtgagcatccatgggtgcacttttcctgtcttgtccaggaaacactgtcttgcatcctggacccctcttcctcaacgttccctgaaccttaggtgtagattgccgatctctgcatttgatgtgttgtggatccctagagcagtctccatctgttgcagacagaagctttttagcagaccgggctgtgaactgactgactgcatgaccagggctaggctgtgtgactgggtgttgaggctggcatagatgggtgaggttccaggtacctcacctggcttgacggacctcacatgtctattgacaatcagtatttcatcttttgtgaattttctgtccatttcactagcctgtttattgattcagttgtttgatttctttcttgtgtctgttggggtagggcgaggtcaacattgagctgcttcaatttttcttcactttctcttttgagacagcagcatctatcactgaatctggagctcatttattcaacttggttgggtagtcaacgcactcgagggtctgatgtctccacttctgttcggggtcacagatgggtgctaccacacctggctcttatgtgggtaccagagccctgaactcaggcattatctttgcatggcaagccatctcccagcttctggatatttaaatcttttggatgctactcttccatcaggtacataactagcaaagtgttctctcattctgatgctgtcccttcacctagttgactgtggctgttgctgtacagcagccttttcattccaggaagtctcacttagtgggtcgttgacctgttttccatagcagttcaagtcctattcagaaagccttcacgtgtatccaaatcgtaaagtgttttccttattctttactttgagtttcaggtcttttttttttttttttggtttggtttggtttggttttttgagacagggtttctctctgtagccctggatgtcctggaattcactctttagaccaggctggccttgaactcagagagagatctgtcttcttctgcctctagagtgctgggattaaaggcctgcaccaccattgcccagtgagttttaggtcttatgttaaggccaggtattcatttttgtaagggtgagagatgagcatcaagattcattcttttgcatctagtttccctgaaacatttattgaagaaattgtcttttctctaaaggatgtctttgccaaaaatcaggtggttgcctgggtttaatttacatctggatcttctattatctctgtctgcttttgtgccagcactaggctggcttgttgctgtgactctgtaataggatttgaaaccaggtgtgatatttccagcattcttcttcttcttcaggaatgctttggctatctggggtcttttgtgcttctgaatgaagcttttttatttgtttgtttggttggttggatttgtttttttcctatttctgagaataaaaacattgggatttggatagggtttgcattgtatctgtagattattttttgtaagatagtcatttgtacaatgttatgtcttttagtccatgagcatccctgggggacatggctgcaggcaggcaggcatgacactggaatagcagctgagagtttacatctggtctacaagcaggagacagagagagcaagagcaagagtgagagcaagagggaaaatgagaatcctgagaatggtgtgggcttttgaaatttccaaaccacccccagtgacaaatttatgcctcctaatccttcccaaacagtttcaacaactggggactaattatgcatatgagccttgggggccattttcattcaaaccacctcaagagactaggatgctattccctaatcatggcccttggcactgtttttgttctcattttcccaacctagtgctgttcttagtggatgtttttgtgaaattctgttgtgacaatggatagataggcattagttgtgtggttgaacacatggcctgttttttttcatcttgaagttatatttaccttactgcctcttgtctttaataggatctgaggcagaattgcttgaagttgacaggagtaaggttaaaatgatttgtcagtaccagtagctaataccagtagctaatcacttaatgctttttaagtgaaggctgggtaatagataccaacttaatacttttggttagcatgttgaattgattcatgagtctcccaagacacgtgctaccccatttcagactttgtaaattttatgtgtgttactcttggaaagagtttgtgcttagaagcagggaggttgctatagcactctcagagctgggcttctcctaagtctatggcttaaagcttccaacagttggttctgttttccactatttttgaaacttctataaggcagaattgcacatcctattgaaatatgaacactgaagtttacaatattgctaattaacacagcagttgtgttatgtgtggcatccaacatggctcctgggatgcacctaactgagatagaaagggaatgaagaagagacaaacactcagatacatagaaaagctggggtcgtattgtttccctctgatggagaaactgtagtatcctggaagctcagcaagtttattattacagttgagcagagcagccagattatctgaacacggaggagttctattacatacaaaaactaaggtagcaggtttatagtacagacctaaatccaggaggcaggcttagctaatcttggtaggggcagtgtctaagcataaatatggggtcggagaagctatggtgaacattttttgcacacactatcaacatctatatctcgacttagaggaagatcttgccatccctctaagcctcagggattggggggctttgccattttcccatgtggctgaggggttagagtccttgacatggctgtacctatgccaacagcacatattcactcaggccattctccattccccacagttgtgggaacataaactacatattactcagttaaaaactcttgttttggggaaagtccttgtgttgaagctaaaatgtgcatactttacagtgaaaggtttcttccttccttccttccttccttccttccttccttccttccttcctttctttctttctttctttctttctttcttttctatctttggaaatataaaaattttgtgcattgccctgcacagcagggtatttttttttttccttcgagacagagtttctctgtattgctttggagcctgtcttggagccctctgcctcctgctgggattaaaggcatgcgccaccaacgctcagcttgaatgtatcttaaaatgttaaatattaatggtttccctgttttgtttttggttttcttctatattaaattttccacatgataatccttaatttttgcttgattcatgtgtatatttctgggttgtggaaattgaccatgtccttttcatagtgtcatgtcttggcgtatgttctgaaaactatatatgggtctaatttgtgggtatcagtcaattgtgaagggttcggatgagccgaatcttaccgtcctttcagtgacctgagggtcaccattgatgttctgggactttccttgtagccctcattatcctgttaaaatttcagctaagcgtattttaccttattggtagtgaaatgcgttggcgctctttggctctgccacttcccgtatgtgacattgggatgctgttgcatctcctttgtgaagtgagctgagggtaatagcatccactgtgaagaacttgtggagatggagtgctcttccatgcttagcacagcaaaagggatcatcacagctctacctttattataatggtggccaggtgctgggagagcactacggtggagcactgaggtggagcactaagccagccttaagcagtgatcacacaaaaaggttcctaagggttgtcatgccccagcaaattagccaagaggaagaagggaaagcaggatgcttcactagagatgctaagggtttttcacaagagataatggaagagcaagtggggaaccaatcatggtctcccattcaattcctgggaaatggggacccacacaagaatctgtgtggagctggatccatggggactcgtggaaacagaattccactggagattcagagggacctctgagaaggtgttctgaaggttcctagaggatggagaatgctaggaccaagggagatgggcaggtcagcacctttacctcacacttacttcttaattcctgggccattggaagtaaaaccaaagaaaggtaaggctgcctgtgcatggactatatgggctgtagtgtggagttctcaagtggagaagtctcctgagacagtactgttaggtgaccactgcgctctctctctctctctctctctctctctctctctctctctctctctctctctgtgcgtgtgtgtgtgtgtgtgtgtgtgtgtgtgtgtgtgtgtgtgtgtgtgtgtgtgtgtgcagcaatctgatctgggcaagtaaagacaagttctctggtgttttagaattgcaaagttgtctttccttatagcatgtaatgaaaatgtcattttattttccttctgattttcatttccttaaccttgtttctggggttgcagtttttcttgactactttctaattctctgtagagatatgtagtttaaaaaaatgaaaatgcatcagaaaatgattcacatgtaaagtcttcactcctgagtatgtgcacataaacaggaaatatgaaccatagcaaccgactttgttggctttggctggagtgcttcgctgtgctacttggaggaagagtcatacatagaaatacaactatgtggggttgtgggcagccatgaagagaatgttttctagagcaaggagaggcacttctttgtcatatcatctggaatcacttccatcctagagagcaatttggataccgtgggcttacagaccaaatgaacaggtgcacagctaaggctgtgccagaaagtgacttttctggaatgcctacagaccttattaaaatgtgctgaaagcgtttgttccttcacccttcccagtacagccttacctaatgtggaagacatgaaaacaaaaaggcagtggctagagctgatcttacatttccacctaaatacaggccctctgtccatgaagcctctggcagtggacaacagacagccaagattgtgacccatgagagaagatggtaatttgagggtcctttgtcctatcctgtatccattttctgccacagtagctgtggccagcgctgggagagcctgtggtctcatagcctgcaggtggaaggtctgtagcttagggctgccgaggctggaatttgcacagcaagataatggagaaagaaatacttgagggccgagatctccatgtgatcgtggagatgagagagcagctgcatccaggcagtgaacagaaagacggatgtctttcttaccttagccatgctatcagcaaattggaccggccacctctcaaggagtaaggacagtactgtagatgaaggccacttgctcattgctagggatatagtcgaagtggctccatcttaaccaaatgtagaccctggagccacagttggtgaggtcttccagtaacttagccgccacaactgaactgagcccctcaaggtgtctactttatgacagaagggaacgtgtggctcatatttagaatgaagatgaacaagctgaaacagactgactggaaaccagtccttacaaatcttggtctctagcattcttctctgagaagacccaggactctttggagaaatgacttcacccagaacagagacaggacagatataagattaagtcccaaacattttttaatgtgagaaagagaagaagtaaagataaggaaaaacaagtacagagtaggcatctggcaggggctgtcactggctaagtctgagtaccagtgtaacgcgcaggaatcaagtgggaatatgtcataagaagagctgcatgtgtttgtactaagcctaactgcttcgctcggtgaacagtgctggagaatgcggataatgagtgagcagtactgtggaaggagtgttggcgtcagtgcgctgcacctgtcattaggtaaagtgtgcaatcggaagacatcagggatacctgtcgaattttccttcttctttccctctcctctttcctgtcttccctctttttctcttctttgtcttaggcagggccttactatgtatctctggctggccttgaactcatggtcttcctgcctcagttttcgaactgttgtgattacgcaggggcaggagggaggattttgaggtgggacaaggtatttggatggtcttaaaatgtttttccctagatgaagtattagttgcaaggagaaagaaatgccgtgatttctttctgttgagtaaggtggtattacattggggtcagatagacctggtacgttcagatgtgatattcagagagattctcacttgggaattttctggctaagcaaacaagctattctgattcatacagaatcactcgaggaaaggccggataagccaaaatggaaatgttccatcaatttaaaagggaggcgcctcattcctctcaaggtttttgtgacgacaaaggggtactgtgtgtgtttcagattaaagagaaataggagcgaaatgctttatctaaccctagctgcatcctgaattggaagaagtcttattaaaaaaaatccttattagggcaactgaatatggtctggattaaagcatcggtacccagattgatgactgcattgtgattgcctaagagtattcctattccttggggataatttctgaagtttttagagaaaaagggccatgatgtgtgaaactgatcttcatatggctccagacaaaagtgctaaatgtgtgtgtggaagatagcaagtaaatgtgctaaatgccagcaagcaaccccaggtaagggctacctgagtttttttttttttttttcttttcaacttttcttagatttgaaattataaagatgttaaaaattcatcagtgataaataggacttacagggcagaagagcgtatgtgagaaggacacagattcatctgcctgtgtatggattttctactctgagagttgcttttctaagtgaacagttttatggcagtgtctcagtcactttgccgacaagggcacttctgcatctgttggctgaaaaggtagaccagcagatttaatgcaagaagaaacaatactgattccacctcccaagtgctgggatgcaggagccacagatggggaattgaacctaaggctttgacatgctaggcaggcactttcctggctaagctatgtgccagccctctcctttgttctttgatacttgttagcggagtagtttggggcaagttttctaaccattgggaatgtcaattgctgctgcatttaagaagaatattctcaagacacagtgtatcctcaaaagtgtgaggttccagtgaggaactcattgaaaatgagaatgatttgttttccaatactgacatactactaagagttttgattatagatgaaaaatggcccaggctaaactagagattttccttaatttgggtggtcatttctcctcttaatggtgaagatttttacccagttaagtgaagtttctttctgtggtggacacttggttcctttgattgacttctttgtcatttgctgcctttgttattctaggcagagcttcagtggctgaaggagctgtgatctttcaagcacagtgcagttggagcagagcggggtgtgtgtatgtgtgtaagagatagcacaggtaagtgaaactgtgcctcagtcattctcaaggattcagggatccttgtatttcttcttgctttgctttgagattgagtgtccagctctggtggtggtgagagaagtctcaaggaaaaattgaccaaggaaatgtccctggccttttctttgtttggggtaacaccaagctcctaaatcatgtcgaggagacttatttagttgaatgctcagcctggtttaggcttgtttgtagctagctcctttaacttaaattaacctgtttaccttttgccttagggctttataccttttctttttatgtcctacttttcttgcttcttctgtgtctgtctggcagttacctggttggccccaggcatctctttctccctggttctctcctttccttccctcttctgagcctagatttctcctcctgtgtattctctttgcctgacaacccggcctatttcttttcttcttaactattggccatttagctctttattagaccgtagtcaggcctttatgagtgccttagtcaggcaaggtgaaacagtaacacatcttttcataattaaacaaatgcagtataaacaaatgtaacacacctttacatagttaatattctacaacaaggagaggccattattttttttggggggggtgcgaatagagttggagaggccagttaccccattagaggaggccagcaatgtggctaggcagaatgacaaaggctgcctacaggaagtgacctcctcctgagtcatataagccccaggattttggaagattccgggaaggcttagggtgtcatccaggggcagttacccttagtcctggtttgctttcagttgaagtctttatcttagaagattacagttagcaagtatgcttccttctttgtacttggccagtctatgccactgctgcaaacattgccagtgaggtgtaacaaagaccttcaccaaatgttctggttaatgccatgaagataactcagaaggcaccaaagtatgtcaatgtcacattaaggaatggaagcaaagcagtttctccttggcttaatttgatcaagcatgagcccaaatttcattcctctaccaccctccttgcgccttctgactggtttgtggttgtcagcctatttgtaatctgtctgttgtgggtgtctgtgcctgatgcctgagacttgtaccccggtgtgtctgaatctgagtctgtccctccaaagggctttgttctgaatttactggacagcagagagaatatggggggtgaggtgattctttacaaaatctttaacagagtcttacaagaggaagaagttaccttattgacccaagtggcccagaagagcatttaacactacaaacgatgttttcaggatgaatcctcatgctgtttctaacatttatggtctaacataataattatggtctaacattatggtcgtaaggctcttccagctagcttgttggctgattaccatgttagactcccggaaaaactcaggtctccggggtcccaggccatgaccgtggtcacccccaatcaccaggcagattcgagagcttggtgcaaactgcatgaagctttattgttttttaacgagctaaccccatgttagctcgggtctttcatccacccaccatggctgatggctagcaaagacccctcgaactggctgctaagtgatcttgtagggcagcgtaaggggagtgtctaggggtatgcacaggctcaggattggtgtgcctccaggcttggagggcttgtcctgtgttgactggccaattggttgttatggcccataggccctcccagggtggttgctattctctgctcgtcattgctgtgcacttgtccgtaaagcacacccagtgcagtaaagcatagcgccaccagctaacttctgattggttccttgtcacgaggcaggcacctaacctctagtgactaaggcaaggtcatagcgagcacatgttactgtaatggctgccgaaatggggggctggtcccttcaccatagcatacatatacacacatgcactattctgggtcagggacacgagagatcacacaattttaagattaaagctgtgcacttagcttgtaaaagcttgcatgggatatccaagacagtaaggtgtattaccttgttctcttaaaggggggttaaagggccaggcggtggtggcgcatactaaagttggacgcaaataatgcatacctcaaaggagtcagaccaagtttgggatgaatagatgttttaataggaaagtactcacgcaaccagtcagtcctctacaccaggcgaaccatggaacagagagcgccgcctgcatgccaccctcatatttaaggtcttactatgtcactgaccacaccctagtgtgcgtggtctgtgtcacctgtgccagcccccgaaagggcgtggctaatatttcccctacagtatacttttaattccagcactttcgaggcagaggcaggtggatctctgtgagtttgagaccagcttggtctataagagctagttccagcacagcctccaaagccacacaaaggtgggttaaaggtaaataggccaagtaggacagacagcaggccaagaacacagtaggacagcaggccaagtacacagtaggacagtaggccaaaaatacagtcttaaatgatttcaaacagtattattaacctagctgcaaggtccagtaaaagttcagattctttggtgtcaagagatatcttcagaaaaatgtatcactgcaacatagactataaaaactagctgcatgacctaaatagtatctttatgtcactgtcaattgccaatctagcatatctactatgcctgggataattactatatacataattactgtatacataaagacagtattgctaagttttgcttgttttcaggcttgataagaacaatatattgcatgtaacatttttacaacttgcgctttttgcttgggtgtgctgttatagtgagtcaccttttattggtcaaacaggatctgcagttagaatctattgcagttcatctgtggtctcacttccctccaatatttgataattttgttgccgtcctagtgtgtgtgtgataatgtattctaagttgctcttcttggtgaatcacaggattgcacctgttctcttttgtagaacagagctcacaatttcagtgtagacaaaccttttcgatctttcccttctcccatcttctgactatggctccttttctggtttgctttgtatcccaggatgcctggaacttgagatcctcctgcctcatcccctgagagctgcattaacttctttcattctttctatgcatggtggatgcatcttatttctattttgtttattggaatataattgaacattttttccatgtggtcaactttcattgttttagattgaaatatctgttggtttatatccttattcagtttctcttatgtgttgaatttctcttctaataatggtcctgaaagtactctgtggacacttggcagcttgaaaagctcagtcatcattttaagtatccttactcctttccagaataatacaaaactcacggggccactaatgttctttctgaacttagatgcttttgtcaaaacttataaaattgagccaccataaaaaatagatatgtaaatttaggacagtattttttttaattgtacatctttaccatgtctccccctttcctcttccatcctgtaccctgcatcttaccagctttatcctcttcagaaggctcttcgccgagagccccctggttttggtttctggaatgtctgagtctcacccttccagttcacagctgacaattacttccagatggccttgtaagcacattctcccaatgtgctaccactgcgtttcttgtcagtgtttataagacatctatgaagtctctgtgtgctggtctttagtggatggtttcacttactccaaggttacttggttggtgtgcagtttgttgtttttgccttgtttttaatggtgcatttcatgtatctacagatcgcctgtcattatcagccctgaaaatgccctagttattagtgttctaaacaccgtctcctatttattctattatctcctccagttatggttaaattaatgtcaggactactttttcctctcagcttctttataatgcctgtttgaagtttgctctcttttctgcttctttttgtcaactttctcaagattgaacttctagcttaataattttctcttctgctgtattgaattttcctctgagatcttacttttaatgatctattttctttttcgaaagttctgtttctgctttcaagtctgtaagaatacctttgatgaggtttttctgctttatttcttatttcatgttttatattcttaaccaacaataaatagttatttcatcccttatatttgataatgccaggatttaaactcctttgtgctctgagtctgtattcctcttccccaatgtgcagattgagtttgttatttgctaataacataaatggggcttttatctgagaagattgtagttaacaatgatgagctgtctaagttagctccaacgggagatcctggctgtctgggaggtggaggcaggagaattgagttccagcccagtccaggaagcatagtaaaacactgtctgaataaaaaaacaagcaaacaaaaaattagccaagtgtggtgtcatattatagtcccagcacttgggaatctgagacatattttttgtcagcttgtgctacatagtgcgtttttagaccagtctatgctatatagtgagactttgtcttacctcaccttgccctatgaagtcacttgataattatatcttggaatctcaaggtatctcaacttctacagactatggacccaggaccaccttttgtttctgaaaagctagctatcagattccctgcactgtggctggagtcttagttgtctcctgcagtgtcgtcattctgctatgactactcttcaagcattttggcttcagttttcatgcactgctcctgccgtattctctcagatttggtttctgtacctgaggtcattaagaccattttaaaacatagttttatacattttgtccaaaattactgtacagcagaaatctaattcatggcaattcctgtcttaggagtgcccaagtgattgaaactaaacacaacagtgcttcctcagccccagcttactatgttgcacaatctgttttctgatcaagtgtcgttttcccttctatctagaatcctaggcatacaagattcaactgtgactctgccagtggagctgcaggaaaggaactgtttgctagtgtgacttggtgtcatctctataagcaccctcagtgttcagcatgtctctattaggtgtggaaggcaaaatgaaagttttcatttatagaatgctaagttgccttgggcttttggcatctgaagtacttcaaaaatgtgtgtccagtataattgctgatttcatagcttctcctttttctttgttcttttgcagaacaagcccaatcatacctctttagctggtacacagttttgacagatgtgtgtgtgtataattggggatgaaactgggctggaaggcatgcttctagcccacaagatctttatcctttgctggttacaaggatggcattgtggcgtttgcaatgccagcataaccttagaaaggcaggcactgcaaatgttgctgggaaatgctgagctctgactggaggctctccaaatattgcctggtattttccctagaaaaaatataaatgctagaaagttctgcagcttttctgcctttggatttcaatttggattggtagttccttatgtctgtgccctcatagtcttgtttatttttggggggggggttggcagtagttcaggcagtgctgctgggttttgttttctaaatgcttacacatgccacgtgaatacacacacatgttacacatacacatacatcacacacatgcacacatattcacacatcacacacacatgcacacacatgcttacacatacacatgtacatgggttagctgaacattcttataattctacacagggagctgggggaagcaaggtataggactggagaagcttgctctgcatggccacacttctccagggagccctgggcaaaagccctctgggatgactgtcgctagtacatgctacttggctgtgggggaagaattcgatcatctctgctttgggtctgtcggcctggaccaggtagttcatttagagcagatgctgacctctgagtctcctgttttcccccttttcaactataaacatgctcctgtgaagactgtgattagtgtgaaccccttgtctgattaaaatgtttttattcgcatgtgtagattaggcaaaaccatttctaccatggttcatctgagtatagttaatttcttactgtgaacctgattttggtcagcctaataatgtagcgtttcagacgtccatgtctttttgaatgttgagaactagggcttgctggctgtcatccagaagagtgactgtgaatctccctttggtcaccaggctcagtcactaaaccccgggcaatgctttgctaagtgtgctctctgattcttccggcttcagtaatttgcctctgtggtgatattggttactcatctctcttgtcttgactctggaccatcagctatttacacattgtcttatcacttctctgtctgagactaatataatatagagtgggtatataataaggtatagtatagtatggttccttcaaacccttttgactacaagttgttatcggcttgctagctcaccttaaaaatgctaacaggttagtttattttttgttttggctctgcaatagtaaggtgctgagaagttggaatcatggtacagaggaagccattcagctttattgataaccagactacctgggtcctgtttgaagttgtactcatcctgtgtggttctagttaaccacttagcttttctcaatcgtgcttttccccctttataactactttgatctgtgcatttgccagagcagtacttcccaagtgttttggctttatagctgtttaatagtcttgaatctctctctctctttcttcctctccctccccactttgtgtgtgtgtttgtgtgtgtgtgtgtgtgtgtgtgtgtgtgtgtgtgtgtgtgtaacaggctttcttatgggccaccaaccagctcacaaatcatgacacggagacttcatattagttatggatgcttgcccctatcttatgctcgtcccattagctcttataacttaaattaacctatttcttttcgtgtatgtttttccttgggactttttacctttctttcattctgtgtgtcctactccatgtctgtctgtttgtctggtggctgcctggctgactggtcccaggcatctccgtctttttctcccttgttccctctctgttctctcctcttgagtctagattcctcctcctatttattctctctgcccgtcagccctgcctatccttctactgcctactctactcattggctgttcagctttttattagatcaattgggtgcctaaggcaggtgaggtgaaagaaatacaacacatctttacatgaataaacaagtgcagcataaactcacgtaacacacctttacacagtcacagtcatatcccacaacatgtgtgcacatgtgtgtgcatgtggaggccagaggatgacatttggtgacttcctcaatcactttcgctctctccttttgagaacaggatttctctaagccatttctccagccctgagaacagaatttctcattagactaacaagcatttaactgagctgtctccctacacccttcataatcttaaaagttactccaaagaacttcattaacatgagttatacccagcttgtcacaaaagcagaataatggcccccaaagctgtccatgttctcacccctggaacctgtgtgtgtgtgtgtgtgtgtgtgtgtgtgtgtgtgtgtgtgtgtgtgtgtgtgtagctctaatgaagttaagggcctcaagatgggaaaagggttctaaatcgtctagccatgcatctaaacaagggccaagtagagctgggtccaggtagcgtcattacatgaactcatgtgaaattcattccttgtaagagtgatacagggtagccagtgtcagaggaggagacatgagattgaagcagccatcaaagtacaacacagcccaggtgtcctgctctggacatattctccttcagcacttctgagaggagcccaagcttgcaacacgttgcaagatatattgcgaacctgacctccagaactgtgagatgattcctgtgcattgttttaaaggcatcccatttgtagtcatttgctacagcagcagttcgaaaccgatgaattcatttaacagtaacaaacccattgtaggtgaactttttttttttaaaggtgctggggaccaagtccagggccttgtgtatgttaaacaggtacaggaccataaactacataaatcagttttcttgaaataccatccatcagttagtgagactatagttagtgagactacagctgtttgtatttttttgcaaatgcttttgtcaggttagttagaatctggctgtttttttctgtttgtgctactgtcagtcagtggcagtatcatgtgtcatgcctcctctgaaaaaatgccatgcttacatgcaagaatgagcactgaaaagacaaagccaaagacaaaaaaagacaaagacaaagaccaaaacaagtattgctaactatgaagtagtttggaccttgtggactaaatattagggttttgggaactcaagggatccacagaaccaaggagctagtgcatagcctcattgctagaaacctttctgcatgagtgggactgtatttcttactgtaagcaccagttagaagactggagcttggttcttaaagaaggtgattattaagggattggagcagactcattttgactcatatttgttagactcatatttgttagaacaaatatttgagtacacatagtttataaagaatataagtgagttgggctcatagatgtggagtctaagaactctaaactcatggaccagcatctggtgaggggcttcttgctgcatcataacacagaggagtgagtacctcacatagtgagacagcgagtatgggagcatggcctccatgggaataacaccatcatggcctcctcgaatcctaatgacttcacaaatgctccatctccaaatataatataactaaatataatcataaccatagcaatagatagtcaccaacatgtgagtctcccttcttgttccagtatgagctaggaaaaatgttcttgtttgcttagactgcatcattcggaaatagctaaaataatacacagtagcgtggaggcagaggcataattgcaagggagtgcatttttggcattggtagataccatacaaaataccttttgtctgttgcttacaggcagcttttgataactcgcttggaccttttgaagctaacaataagcttcctttccctgggaagaagaaagttgaaatgagttttaaggctcagctttgatttgtagtttttctttgtggatttgaaaatacatgacgtatgacctttctactggggtcatctgaagtggtccctgccactccctagcagcatcctgcaagttaagaatcatccagttccagtttctgtgccaaaatgctttctactttgaaaggtgtttagtctgtcagtttgtatttaagtggctcgatttgagctcattgtaaagctttagtaaagatttcattaactgataaatgcgcatttgatgtatttgtagagttatatttaaatcaacgattataatacctcttgtgtgacagggaggggacttgggaggtatttcagagtcctctgtgtgactttgagctgttctttagcttgtgagttggagaagcccacatgtcacttgcactttgtattgtccattcctgactttattgatttggaagggcagttttggggtagcaaggaagagtgtagagaaggtaactctagagactgaattccttgggtagagggatccttctttgggttgacctttgcagacctgagctgggggtactcttctgtacacttagaaaaccttttcctgaggctcacgactacctgcccttgctagcttctcttactgcatggtgtgtcatggaaccaggaagcaggttcttctccgttaagccttagttataagagggagaggagaagcaagcaatcggtgggtgacatttgatgttttgtgactatgagcttcccatctgaggagttcaatgtttttagtgaacagcaccacaatggcggcatgtattaacaaatgtagtcataagactctgataggtgttcctgttgtgtttttgtatgtattttaggtcattgcctggaagttcccttggatagcatctttgagcttatccctgtggtgatatattgtttatgatttaataaagccactggagatcaaaatgtaaagctagttacagccatagaagcaggcagtggtcatatacacatttaaccaggactcgggagacagagacagacggatctcagtgagtttgagaccagcctggtctacaaagtgagtttcagaacagccagtgttgttaacacagagaaactgtgactcgaaaaaccaaccaaccaaccaaccaaccaaccaaccaaccaaccaaagaaaatggaatcccacaatgacagttccactaggactatggtaacaccattaagctgaataacaccaactaaagatcagctttggactacaaactgctcagatcatcagcggagatgacccacccttacagactcttctcagaacagctcaggtgatccagcctcacagactactctagccaggacttgagataagccctgtacgttccctttatgcagcgacaggacagaaaagatacagcctaacccaaaatttgtcttttcaggatccctaaagatgccattgctcccagacagcaggaagtaacgttaagaacatagcacccacattcccaagaggcggggtgggtggattttggcctttcattgggttatgaacatttgtcattgtttaggggagttggttacaaaatattgttcattatagtcaggaagaaagttgaacaaaggaattagattcagattcagagttcttgtttagtaaagaaaaaaaggggatacagatatgataggataaaagggtagattgctgaatctactctgaaaagaaaaaagggaggatatatataatatatatatatatatatatatataatatatatatatatatatagaaaggtagattattgaatatacttctaaaaagcaactactagtttaaaatatcttacatttgattggacttcttcatattatgtacaaacattatatattgatataaatttgagattaattttgttaagacatagtgtgcatacatttctaatcttgttcaaggtattgtacctatacagctcatttaacaatgtaatgcaaatttctagtccttgaaagttattattaccaactatacaggataataatgaaatgcaggtgagtaattagtcacctattgcaaccgaatttatggtcacattaggtatgtttacaaggtcaaacagagatataatttagacagattgtcgtcaagcactccagaggtctacagaacatggcatttgagatattttaataacataggttctttttttttatgacaatgagacatgtctgttcctggcagcaccaatctacttcagagaagattttgggcatcgaagaaactctacatggagtttaccttctttgtggcaaaagtagccactgagtaagaaagtgcccttgccttgactgctggcagtatgctgtccaaattggacaacaggacacaaaagagagtgagtgcaaaccttgcgaagataaggtgggacagtccttcagaatatcctgcttcacagaaaaatctgtcagagatgctaggcctttaggccaaggatggatgtcccaatgttgcagaagaaacttgggtggctgtccaggaagccagctgcttctgtcattttttacagtttttggaagtcacttgctcacgcttcctgcttactcagttaatattatctccttcttgggtctctgagggatttgaagactagatagttaatagtcttcattgtttaccagattcagagaagaaactcactaaagagatgtaaagtataaaaggttgagtgacattaaaagataatttgataatgcaaattagaatagaaagtaaattaggtgcaagactttgaactcaccaagatagaatagataatggagtattttctctgaatttgtcaaatgcaaatggactagacattgttgatgtatttattgcttatatattatatatattttattgtacttattgtatatatatttttatgttagttatagccttcctttgttgtattagacaaaaaggggacttgtgatatgttgtttataatttaataaagccactgaagatcaaaatgcaaagctagctacagccatagagccaggcagtggtaatacacacatttagtctcaggactcaggagacagacagatggatgttagttcaaggtcacactgagctacatgaaatggatccagtctaaaagagaaacagttcatacaaatatgatcacaccacttgggatcacatggttttaataccagtacttgagaggcagaggcagaggcaggcagatctctatgagtccaagaccatcctgggctacatgtgagtaaatcagagctcacgcctttaatcctaggatttgagaggtataaaaagaagcaaagctctcatgtgagatttagtttgcagacagggaaggattgcagtctgagccttggtggagagcagtgcagtcagcattgtacttggagaatttgtgaggataggacagccctttaagcctgaggtaaaggtaagagctagtggccggctgctttgtttttctgatcatcagcttgaacctcaatgtctgtctctgggcttatattattcatgttacatatctcaacagtcccagaggggaggaggtattacagtggggtattgtaccctctcctctcctttccagatatccacactcagggatactgtgggttggcaaaggtcaaaatggcccattgcttgttagggcgcagccctttgaaaagccaggtgatcgactacatcagggcttagtggcatctagaatcatgggtagaactgcaggcatcttcaagtttaggttatcaaacaccattttgatttgagagtttttttcattgttgaatcattaaatataaatgcttttttgtgtgcagaagcaaaccgtaatgcagggctgagagctatgtctgagtttcctatctgttccttggcctgagagcttcctcagagactcagcagatgagaggcaagctcacaggctgccaaatccaggccattgctttgtactcaaggtctcctgggtgtgcgtggcagtggtgtgggagtgggggtgggggagcccagggtggtgatttggatgtttgatgtgacaattgaaagatgagtctctctggaaagagactttctgcaagtgtcgcactgtcccatccctttactggaggatgtcctgacaactgccatcacagctgttgcagattcttgatgcttcttgagagctgtatctctgccagcacagttcttggcagttgcccttagaaatgaagtcatgagacacagcttgtgcttctctccatacaccattagaatagcaggatagatctgttcttccccaaccaggctgcttagctgcttgtgggcatcagtcatgtgtgggaatccaattgttttctaaccctcacctcctgtgggcctatccttgtcttctctcggacacataggcatctccctgttaatatttagttgctttatgatatgcttctttaactagactttaactatacacatcgttgattgatttctttgcagttaagactcctctggccaggcgttggtggcgcacgccttgaatcccagcactcgggaggcagaagcaggtggatctctgtgagtttgagaccagcctggtctacaagagctagtaacaggacagcctccaaagccacagagaaaccctgcctcgaaaaaccaaaaaaaaaaaaaaaaaggaaaaaaaaaaaagacccctctgtttctcagtccactcccttgaaaccctgctgctaataatgcaatctgatagccacacttcacttttgcaaacattctttgattcacctatcatgtgccagggaacttggggtataggtaccaggagataaagagatgcatcaggtaactggggctactagtattgaacagggaggtgatgaaagatatggtttcaaatagcagtagagattagtagtagatgatgtgcagactaaaagagtgaaggaacaattctgcctataagcataggtcccacaaacaaggagggaagattatggtagacgacattaattaaaagctggtgccatcactgtgtccactatttctaatagcaattgaaacaaggggcaataatggcagatgggtgtgtgggcgaaggtattattcctcccagaggtagcatcacttggagaattgatgattctgtgtatcttctgagtcaagctttggtccaaggagatgagtggtcttcagtgacgctcttaagccctcgagttctttggtagctctttctattttgagagcatcttggctatgtgcctaattcttagtggttccgagacttggctgctctgttcttgtggtgggtctgtagcattgagtctgagaatggggtttgcgtactagggccttcctctcagactatgcttgtgacttgtcactgtggttagtacgtgtcagcctttgtgtgcgtgcgtgcgtgcgtgcgtgcgtgtgtgtgtgtgtgtgtgtgtgtgtgtggtgtgcgtacatgcgtgcgtgcgtgagagagagagagagagagagagagagagagagagagagagagagtgtgcatgtgtgtgtgtgtgtgtgtatgtgtgtggtttgtgtgtgtgtgtgtgtgtgtgtgtgtgtgtgtgtgcgcacgcgtgtgtgtgccaatctacttcctttgaaggcagtggccattgtctccttacagcataaacaggacctgacaattgaactccaccttggcacatagcagctgcagaggcgatagctgtctcatttgtttagtattttttaagtcaggaatgaggcgtttgtagtcaagtatgacctggagcttcctgtgtagtccaggctggctttgagcttgatcttcctgcttctatgttttgagtgttggacttacatgaatgagacacagtgtcctgcatgacaattccttgcccccttaaagattattactttatgtatttgaatgttttgcctacatgtatgcctgtgtgccaggtgtgtatctgccttcagaggtcagaagagggtaccagatgctctgggactggaattacgtacaattgtaagttatcatctgggtgctgggaattgaacctgggtcctttggaaaagcaatcagtgctcctaactactgagccatctcttcagcctgataattgctttttaaaatttgcttggggtaaaaattgagagcaaaagaaaatcctgattgaccaagtgtctctgtgggaagggcattttctgtatggaatatgcttcaatgcatcagatttgtgttctgatgtgagtgtgattgtgtaagtctgtacacccaagttcaagtatagacctgtatacagaaagaggaaagactagtgaatagtgaaatctgaagaagcctgccatttagtgactagtattgtataacgtcgcattcctgtttttaatcattgtgttgcagttttgtaagacagggggcagctgggtggagaatgcactagaagtctaacttttgcaacttgtacatcaatctagaattattttaaaataaagagcttaaagaaacacagtgcaccaattaaaatgctccaaagtcaataaaactgaacaaaactggttaagacaaagtcctggaaaaagatgcttaggaactagagctctttggcactttgctggtggggatgctgagtgttgcatcccatccaaaacagagtcagaaagtttcttcaagtacaagccagtgcttctttctgctccttgggtttgtagccaagagcaatgaaagtgtgtttgcacaaaaaacctctgggattatgttcctagcagctttttctaaaactgtaaagcacatagggaatggtaaaggaactggtctgtccctcagtggaaagtgcctcactagtgggttgcttttcacttgtagtaaagagcaacaaaaccctgcagatgaatgtcagattcatcacagagcacgaaagccaaactcagaagggtgtgacgagtaggaagccatttcagtaactttctggaaaaaggtgaagtatagaattagaaaacagaccaggctaaacattttagccagaacagatgacaaagagagaagataggagtgcaaaaggggtagagaaatctagaatgagtgaagtgtttctctctcccctgccccctctctgctgtggtggtgacattgtttttgtcaaactgacagagctgaacatgaagaaagatgggttgctgtatgcaaatgagacctcattaaactcaacttaaagtgaaaacactacaaaacactatgtccaccaccaagaaacattactttggctttaaaggctacgaagattcagtgtatcccttcttgcctgtggttggataagaattaaggcttctttaggtacatgtgcttccttgtttggtgtacagttccagcctcattgggactttgacctctcccatcatccacacagcctagagtggttgctaaagccttagacatctatacagaccctggttgcatgtcaccacgtccctgggtggcagcacagggcactcagatcaatatggccctggtggcgacatggcccttggacaccaaaataaccacaggtggtggcctgcacctcaggcatccccgcggccttagtggcaacatgggtcatggatgtcaacatagaccccagatgttgcagatccagataaggccataggcagcagcccaggcccagatgttacccaggtcctgggtgacaagctggctgcaaacctcatccctttcctcacagcccttgcttcttcagaactgcctcttaccacagcatgtagaccattccgcctctctttctctctaagttcaccaccatatacttgcttatctgtcatattgccacccagggcaccagttggggatatggatgcttcaggcaggctggaccatgaggacccaggctgccacataggtgtctttcgcccgcttgctttttgattcctcaggagccacgcaattagatgtgacctctctgcatccaggggcctttccaatccataacatctgtcacagctgcacaagccctccctgtaaggtcacgaatttacaggttctgatgatctagtatgtgatgtccttgtaccctccctccctccctccctccctccctccctccctccctccctccctccctccctccctccctccctcccttccttccttttttctgtcttactgataaactgcataaaccagcctagtatacctctttcttcctccatccccgctccccctcgtctcccatctctgtatgctttgtcgatttagcatctgtctgtcatttggtgatgctacacgaagttgtatactctaaaacgttttctattttcctcttgcagtggtggggtttaaatgcagagcctcacatgtatcaggccaggagtcactgaactgtatacacccagcctccagaccctgtgctgtgatagggttagattagcctgtgttgcttttttaagtgaagttcccatcagtgctggagtgaccagtacttagggaagaatggtccagaagcccccccagataccaagatctgagaatgctcaaggccctttctgggggggtgggggtggagggggaggggggtgggagggtgaaggaggaacctaggcaatatttgaatataacccacacatgccctcctgtaaactctacgtcatctccagattgcttgtgatgcctaatttaacatgatttaaatgaaaagcctgtgcatgtccagtacagatcattttttcccctgaagtattttctgtctcgatttggtcagattcaagaataatgaaattgtttatgtgccaatctgacactactttgacaaacttttaaaaacacatacctctaggggaactgcagtgaactgtgaggataaatttacacccctgcatctcagtccccaggtggggtcagcatcctaaagcggtagtgtgttcagctctttaaatatttgaaatactcttatacataaaattctcactggatatatattttctttcttaaaaacaaaaacctctcaaacctcacggaaccaatgaccataattttaagcagagggttcactcacacagccctttttggtgtctgaggtggccatgtgttggttgaatagctggggctaccgagagttgacttttgacagttagtctgtaagttgtccctgagtagatttatcaagggtgtttagtaagcttcgtgctgctgcaggctgagctggggctcgtggtaactgaaggagccccagttttggagccccaggtcagaagagaggttctccctttgtgttgccacaccatggtgacagtgtactatgctaccttgaaactcctgagcttgacgaggccagttaggatgatgtctcacgtgaccagtggtggctagaagtggtattatgatagcagcacattagttgttaactgactggtttggaaaaaggatgaggtgttggctctcatagaagttaaactgccaaatacattaggcttaatgcagagatctcagaaacagggtgctgttttgtgtgcaggggtgcattccatggctcaggcctctttctgcccctctgctcttgcacagaagggtaatattgcatttttaaaaatgtgattttggtgacccagagtgtttgataaagaggtccaagctgcctgctttctagcctgcttaggtgactccccgtggtccggtgcctagggcttcggtattcctgggctctgttgctcagtagagacaagaagcttgttgtaggacttggatccgtggcagctacagggggaaagaatgacaacatcctgtttgcttttatgagctcaggcagtgctttcaagaagatggatgagctcacagggatggagtttgttgaccagacaaccctaccaacaagctaggccatcttgtgcaggtccttccatcctctggtcctgtaaactgggcagcatggactgagcatctgagtaacccacacttggtgttagaactctggagatcgctacatttgctactagaccatagggcacacgaatggacaggcctggaggagtttggggttttcaattgcttcctgttccgtgtggcagcacttactcatgtgagctggcttggttctgtggttgactgtgtgatcttaggtggtattcactttgtttcaatgccttcctcttcagaatatgaacgtagactccacatagatatactctgccctgctcagtttgtgccttcattttgtttttccacatggagttttcatagttcctagcatcagctttgaaggaaatctgtggtgtataccaaatagtgaggagggaagcggctggctgtccttgagagagcacatagaagcacctggagagctccgtttctttcccagggtatattggattttgctacttttgaagagttgggagttgggatatggatatctctaagtccaaccagcgtgaactctacccgcaaggatgttatagggtgcagacatccacagaaatgacttaattgtagttgtgattagtctaggagagtgtcatgtgtagtagaagtaagttggagggttcacatgtgaccaggaggtcagaaaagtcctcctgggtcatggccttctgctagaggtctgtaggatgagagggagagtgtcccaggccagggaaggggcgggggcagaggagtcccagctccgagactgagccatggctgaggatagaaaggttggaggtctgttctttgggtagcgtgtaggaaactgtttactctgggggcatctcctccatagatgttcctgatctgcattcccctcatgtcactgctgctcaggtgactccgtagtagggacaccttccctagttccatcgctctttgtcacagcctgagaaaccctcagttggcctctcgggagaagagagtcaatgacacaagggtctctgcaggcccctgctctatgcatagtggcctcagcaagtacttgggtgagtcatttgtctgcatcttactgtatgcttttgaggcctcagccaactacttggatgagtcacaatttggtttttgtttccttttgaaactcaaatgagtttccagctaacccgagaggtctggggttatttatcctgcaacagattaagcctttcatttttaactaaagacatataaaaggattaattaaaaaagaaaaaaacttatgagctgctgttactttgtataaggtgggcagggtctgtgcttgccagtgaggctgtgtatgtaatggtcacagtacagctattggagttaggcctctattctggtttcatgtctatcacatattagctgagcagtgttgcatagcctaccaacctttctttaaaatggacattgtcaaagtggtagctgtgataaaaagacaacagagagaaacatatttgaacacagacactccttggcttacttatgattgaggctttctgtcctgatacaccacttgtgaatggaagattgcactgggctttcagcaccccagaccagcccaccttcctcctgagcttagctgctttgtacactgcagagtatggcttgcttcccaccctgatctccagctgcctttgctgttcatcatcctcaacctcgggagaggttacgagaaagccaggcagcactgggagacgggaagttccaagtgtgaaccactgtgcccattggatgcttccggccatggacccattgcaaagtcaaagaaccaacgtggaacatctgagggcagggaccaactgtatctttttgttgttcttcagaaatagatacaaatacctaactccacttcctcttttccactactcaaccctgctttgaaagaaaacagaaatcttttcttccatctcacagatttggggtctaaattataacacactgtaattctgctaaactaattgtttgtgtgggaggagcacctggcctttttgcttggctctttttacctccctgggacaggtctagagtctaagaccaaaactggaccagagacatgaagatagcatgcatagaagcaatgagtctcagcatgcaggcagcgacttcaaagcgctaactcagaaatatttctccacagttttcagcctttgggaataagtaaagctgctgttactttgtataaggtgggcagggtctgtgcttgccagtgaggctgtgtatgtaatggtcacagtacagctattggagttaggcctctattctggtttcatgtctatcacatattagctgagcagtgttgcatagcctaccaacctttctttaaaatggacattgtcaaagtggtagtattatataagacggccattgtttgttattgtctcatttataagctcacgtaattggtgctattactaagtgccctagaccgtgcatgggtgcctactccagtgttctcagacttgcttgagcttatgcacttccttaggagcttgtaaattgcaaacattctcaggctccacccagatacccagacttgcttcatcagagccccatgggagaggcctggtggagccccatgacacaccctggtttcagatgttttgcatgaatttcaggtgtgagtctgtatttggtactgtgtgttccagttttgacagagataacatggtctctgctcatgcagtcctttgctcacactcttttctcaacatgtgtaacacattcctatactccaggggcatgagaggacttctagctacaaaggagcatggcgtctgtgtgtgtgtgcgtgtgtgtgtgtgtgtgtgtgtgtgtgtgtgtgtgtggagagagagagagagagagagaggagagagagagagagagaagagagagagagagagacttggctagtctggctttctctctctctctctctctctctctctctctctctctctctctctctctcggtgatatatgatcctgataacctgttgagtataatataggtaccaacatgacgaacctgctcagagtcctgagtcctccaaggcctcagactgttgagatgtgggagtgatgttaacgggaaacgatgtttgcactgagtacctctcacctgtagcgttggtgggcagtactctactcttttcagctgagacctgggaatcagacagcaggtcttactccgtgccacacaaggttaatgtgttctgaatcagctgttttcacatactcctgcaagttcatttttgctctctagcccaagtcacttccttgttagtgataaagagatggatttgtaaatattactcacaggaccgaggctttgggagacattactagtggggttccctgcttggggctctcattttcagcgtgtgatggggtagttttgcctctaccttattccatgaggatttaagatagtgcttgatcttgacgtttctgtccccctcatccccttaggtcacagttttacatgaatagaacttgactacatgttggatttggcttatctttgcctttctgttcgaattatcttcatgtcataagtggatgcgtgctgagaatcttacttgagtgtcaggttcattgtgtgacctgggaacaaatcaatccaggtttgggcaattgatgggggagaagtttgtttccattggtgaagttgtccccccttttctaaaaaagccgtacttgacatgaggagccagagactgaaagggaaagtgtttctgccctatccccatcgcattctccatgaaaatgttggcttgcacagttgtacacagagaatttctaaaatgtcaccgcaggtataaacacctgttggggaacatgagcaggtatttgttgcttcgatagaatgggatcagctcatcctttgcttcttttgccttggaggctcttcttgggtgtacttcggcttcctgccccccagcctttaatagtttagcaatggaatgagcccaggcctgtagtctcctttactgacttctcttgctgttctgttttgcaattgtctttcctcatttgtcagtctttacagggggaaaggctggaggtagtcattcatgtcatcattttgctgactggagggttgctggggtaagtgtttttgagcagctgtagatatagacttctatgtctagtgagaggccttggcggaggagggagttcccaaagactaaatgagggcttggccagggttctcttgatgtcaatgaagaggcaatgactatccaagacatttccaaattacaagtatcttgtgtagtggaggtacagttcgtacccacaaagcaagctttctgcttagacaggtgaaaaaaaacccaaccctttatctccttcatcctgcatacatacataacgaaacacacgcgcgcgcgcgcgcgcgcgcgcgcgcgcacacacacacacacacacacacacacacacaactatgaagcaagatggccaatcctgttaaatacctatactcaaaactgtaaatgtgtgtgtaattacgtctaattatctggaaagtagttctaagccccacccctagagagggttttaatgataccctgtattttaccttgtcaccacaattttcttttcttttaagaaccaaacacattgtaattcctcattgtttgtgtatatatgaggtgtgtatgtacccatgtgtgcacacacccttgtacatgtatgcacataagcatgtggtacgtatgtgctcctgtgtgcatgtggaggtcagaggatggcacggctgtcagttttctccttctatcatcagcttctgttcatcttctgagtcttcttggaggctcttaccacgtttcctaatctctttgaaagtggggcctctgtctcacacattctagaaatgtccgtggcacctaacaagacagtaccttttaaggacttagaaacaatatactgaggggacttaaagtgtctctcagtagttgggtctaagtgaaattctgtatgtactgacgcactgcgagtgttcacgttaaaaagtcgtggacgtatcagtgcaggcatgcatggagcagcatgtgtgtggaagtcaaaaggatagcttttgagaatcagttctcaccttccaccttgtttgagataaggtctcccttgtgtccacagctgcactgaggactctgggcgagctggcctgtgacctccctgcctactttccatctctgcctcccatcttgctataggagcacgctgggcttgtaggtgggtgctaccttctctcctgacaatgaatgcgagcttccttcttcatgtagatgtgtgctagtttctttcatgatttctaaggatcaaatttgtgttagatgcctttacccatcttcctagtgggctgttctcattttgtccgtatccatgatggttatttatgaacggcttttgctcaagaattgctggttaatttttcttagtttctgtatgagtcatatggtgttacatcggcaaactgatgtccttaatgaactggaaggagagggaaataaaacatatttgaacaggtatcctccctaattaaaaatgtagccaagtatctttgtatacaatgcaaaatgtttaacgctcataagatggataatgaaataactagatagctgggagcttctcttttgtttgttgtttctttgatacagtttgtgaactggtcgttcccatccttgttgcctcctctgagcatcaaaggacttctttggggtcctgctgagcatggacaagagaaggaagctcccgaagttggggaggggaaaggggagtgtgagtaaggggacactgtggggcacattggaggaaggatgggtgtcattgccagggcataaacagcaagagaagatggcggccgatgagctggaggaggccagtccgctgcatgtggaccttggttgtctgtagaagagttgagatttgttctgaattgtatgtcagaagtaacacaaaacaaccagtgctttatgaagctcccttttgcactgttttactgtggactggaggccaccccagcagtggctgacccaggttttcctccctctcacctcctatattcctgcactatttacttgcttgagtatctctgccttatctaagtagaatgtaaactctgtgggtcagagattgtgtctttctctactgcagagctgccagtccccagtagcaggtgcaaagcccaacccaagagatgagtaggtcagatactacaatcagagagaatcgttcttcccacaagtgaaatagtgtggttgattacagaagaaagtagaagcagtttaatggagaccagaagcaccttggacaaggggtcaaagttcacatttctaatattggcagaagcacttgtcagttgagaatcagagaatgattctatgagtttaattgtcaggtgacaaggcagacagaaggatattcccagaagcaacaaatgtcatcccataaatcataaaagcagactagcatccgtgtaaaggagatgagggcgaatgcgagctgagtgtggtttgtggtccatgctggatctgtgctgcacccagtgctgggaacaggaaattgttagaaaggacattcatataattgctgaaattagaatgttcatggaggagtgtgtggctcacagcgtctttatgtgtgacacagctacttcgaatgaatggtctgtcatttaagtgtcctgggaaatgccataaaaatctggggttgaaatcatcacagtgagactccaggatgtggtttcctgtccaagcaatgtgaccaggttctttgtcgaagatggcagtttggagattcagaagctctctgacttttggttaacagcgactgaacagcagtcccagtgacaatgatgtcagtacaaggcactcagcttgcctctcgagggtgagattcagctttcacaaaagcagttactggagtggggttgagggtaaaaacagtgacggggaggagctctgcttgtcaacactcaacttcttcccccctttaagaaattatttattctttgagaatgttgtatacaatggcatttgatcatattcaccatcccatgcctcctgcagctcctctcaggcactcaacttcttattggcttcctctgggtgctcagtttgtaaggacacctccagagggcagagagggaatgatgtgatgccaggcactccaggtatatggtgtgcaaagcataagtactcttactgctgtttagagtgatgacactgctttaggaatttttcttgcagggcatgctttgtggcctgtagtgtttcagcccaattcaccaacacccagtaataataggtctctacaatgtgaccccaggctttctgaagcctggctaaggagccctttggtaatctgccaacatccattataaaatcttgaactgccgtagaaatatttaaaattacatatccacataccttcattacagaaagcggaatatttcaaagaatagttattaaagcatagatttctttttaatccagagctaataaacctaaactaatgccactatcaagacgatgtgttgttggaagccatctctttgggtgggtagaagaaagaggttggcatggcttgaagttacaagagtgaaagattagagacctgagccagtagagtaactaaggtttttagagtgttatttgacattaatatttctcagcagagtatgtgaataatgtgtcaaaattataaggagtcattcagaatacactgtaatatcgatgggactcaactgacaaggctgattcagattagaagtataaagggctttgaatatgacaagggtcttgcagaagtttgatttgcatcctttgctcttagcttttatttgaaagcccatgtaattgactcgtttaaatgtgttcatcttcttataacaccggttatttataaccttccaaggtattttgtattttgccatgatttgttagtaagtttttagaaagaggctaatgacagcattattatttggttgtgtgattttgaatacatagcttcgattctgtgaatatcattgaaaagccagatagggttccaaggaaaagatacttacagtcttcaactgctggtgcctttatttttccatgtaccatatgaattcagcctaaaccaaaggtttaaaaatgagccattttaatcggtgaagcaacaaaagagggttgaagagctgcctaataatggcctctccactattgctgcgtaactaggttaatataatctcaggtacatggtgagctcttgatgatgcttccaaaccttgcagagggaggtgggacttagtgctgttgccgctgctcctgttctcaagcgctgtctgctctgtggaagaatgtcccaattcttacattataaaaagtgtagacgagccaggcgttggtggcgcacgtctttaatcccagcactcgggaggcagaggcagatggatctctgtgagttcgaggccagcctggtttccagaaagagtgccaggataggctccaaagctacacagagaaaccctgtctcagaaaaaaaaaaaaaaaagtgtagatgagaaaatgctcttagtattaactctgatgacatcctgaggcctaggaagtatatgcccaattatactaagacaatgccatctggatcgatgacaaatctatattgaagtcctagtatgaggcctatcgtaagttctggtgggttttcagaaataacaaaaccctatcttccttaccatcccatctctccttaccttagtgctcatttggtgtcgatgtgaagtgttgtgagataagtaacttctcccaagagctttgaagacaaggtatttggggcatttcacaaggaaagatactgaaggttacagaaatgcttgcttgaccttagaagtggctgttacagatctgtatgtagtttgtttttagagctcactctcttgcctttctttttcttcctgtccttttctccttctcttcattttcttttcggctgttttattaaaatcgcctcccaagaggtaagtatttagaatgttgatgtaaatcaggtttcctgacattctaagccaactgcatagacgagattttaaaaaaaaaatgagttcaatgaactggttttaaagatgctgtcttaagaaacaggataacaggtgtgttgatgaggatgtgggaaaattggagtcctgctatgttttttatggtgatttaaaatggccccactaccatggaaaaaaagtatggtagttcttcaaaacatgaaaactaggactgcatgtgacccagcaatgccatctctggttagatatacagaataatggcaaatagaattttaaagacccacctgtgttcataggaacattatttatggcagctaaaagttggcagcaacctaaatattcatgagatatgaatggagagacagaatatgctctacatacatagtagaatgaggttgatttgcttttaaaagaaggaaattggggttggcaagttgccccagtcagtaaagtgcttgctatgcatgcatgaggacctggcttaatttagatccccagcacccacattagaaagctgggggttgaatccacctgtagtcttagctactgagggataattcttttgtacactgtgaagatgtgttgctctcattggtttaataaagagccaactggccagtagctaggcagaaagtggttaggtgggagagcttgactgagagaatgctgggaagaaggagggtggagttggcagccagactcagatgatgtaggaggtgaacaaacatgccatgctggaaaaagatacttccacagggtagagtgtagataagaaatatggattcatttaagttgtaagaactaggtagtaatgagcgtaagctgtcagctgagcatttataattaataataagtctctgtgtggttaattgggagtgggctggcaggacagaaaaatctgcctacatttagggctaggatggcagatataggaggatctctggttgctgtctagatatacttgcccaatcagtgaactctaggctcatcgacagaccttgtctcaaagaataagctggttgaaagtgatagaggaagacactggtgttgaccactagtcccctccccccgacatgtatatgtccatagtcaagtgtagtatatgtatacatatacaacacacacataaacacataaagaggaaagaaatttcaacacatggtacaacatgtatgaccttgaagtcattgtgctaagtaaagcaggtccatcacacagggatgaataaagtcatcgcccacttagtgaagcccctagaaactgccaggagaatggtggtttcctggcactggaggtagtgggagcaggtacctattgtataatagaatttctgattgggatgatgcagaaattttggtgatgtggtaatagggttgtacacaatatcaatcttttttctttaaaaaaaaaaagacaggtttttctctatatagccctggctgtcctggaactgtatatagactaggcaagccaaaactcagagatctacctgcctctgcctctcaagtgttgggattaaagccatcaagcccagctacattaatgtccaagatggttatggtaaagctgggccctgacagcctccttgatagtcaagttggccaccagtcctcagtagttcagacagagacacagtagtgggaagcagaaaaggatattgattgaaagtggccacattggcaagaagtatgaaaaggatcactgccccatcctcaagtccatctttaaggtcctaacacgaggcttagatttaaataggggcaagaggtagatatagttaagtagtccaggtccagctctggtcctggtcaaggtgtgcttggcccatcaccactgtatggcaccagtccccccatcaccactgtctgattgccactcctatgtcccccagtccctagtcaccactggtgaacaccagtctccctcctacaagatggtctgctgagttttcagaactgtgggaagtctctccagagaataagctccctgacctgcttaacaccagggcatcagattccctcctcctctttgcacaggattcctggagaaacttcagtttcttgggggggggggtccgttggttcagtagttggatagtcaaagaggggcacaggtctctcttgttcctgccaggacagttacctgttgacagactgaagagtaagtttgtgttattttagaatgttaattggtgtccaaactgggtacctactgtgttttttgttttgctccaccctacccccggtgcccccctccccgtgggtgtttaagaattaggcttcctcaagatttagatggattaaaaggcaaattgaattatcttatgtaagctaatcccaaaggttcccagaattgtttgtgaataacaggacattcctttgactgtccagtagctgcaaagttagtcgaatgcctcctgtgtgggcacagtaatgggttgggtagaagatttggtgtaggttttgcctgttgtttggtcttagtaccctttccatatctctaggggagggtgagtttaaaagattgcttgtgttagattcacttgggtttctggatctcgtggtttgaaaaaaaaagtgaccctcataggttcctagggagtggcacatttaggaggtgtgaccttgttggaggaagggtgtcactggttgtgggctttgaggtttccagtgctcaagccaggactggtgtcactctctccctgctgcccgccagtccgaatgtacaactctcagctacatctccagcaccatagcagcctgcgtgctgccatgcttcctaccatgacaataatgggataaaccctgaacctataaggcagcctcaattaaatgcttccctcataagagttggtgtggtcatggtgtctcttcacagcaataaagccctagcttagatactggaagacttttcagaaacacgattaggagttgcttctgataaacagcccctctccctacctaacagtgtcagcaagtataatacatttctgaaaaacatgcatttattgaaagaaaaatccagctcagatgattttgttatctggacagttatatctgtattgttatagaaacaagcctgttgggagttttgcttaaagctgaatctcctaggggaccaaggttattactgctttagtcatgcaaatttctgaccttgaggtggtgagtgagccaactggagtgttttggggtctgaggttataacggagccacagaacttcccccagcatgtaccaggcctcgggctcaatccttagcccctctcaggtggtgtcctcagggtctgcttgttagtgagggcctccctgagtctgctgaccatctgaccagctggactcttacagaagagagtgcacagtgggaggagccaggagcctagctaagtgcatcattttctctcagacattaatttcatggtacttctgagcaatggaaattctgtgtccattggccatggctctgagacactttgtagtaaagacaccaaggtaactacagccgaccaatggatttcagtggcacatgattgacatctgaagaccagagttgcggaagaggagagaaccttggtgatgaaagtagtttctgtaaatatttaggaggaacatgaaacccttagttccccaaacccaagagtgaccaacaggggcagtttacctatgcatgaagcttgaaattgtttgattgaataggttgttccttgaaaagctatatttaaattaaattcttttataaattacaccaattcctatttttaaatcttagtaggatttgcagaaatctttgattttgctgtgtaaatcctgtaacatatttttatgtaaatatatttttatggatcacactgacttacatcaaactcctggattgggtatttcagctgatgcatcttctgacttacaaaatgaataataactgctaactcctacttctgtttgtgtaaagaagaattatttaaccccatttccctttccatgcctgtaatagttcctttacaaggtttaccaaggtctaggcagagtcacaaatctgtattttgggaagcttaaagtttgcaggatttgaaagtgtttgcctgttggaagaacagtttagaataacattggggaaaccaggattgtcagtcacatgggccttcttcaagggaaggaaagcaatgaaaccttttcacctggaaggcttgagtgactgttgtctgacaacctggtgatcctttgccagcttccatctgaatccccccagtaccctgagaatcatttaggcactaatcacaggctttgtctctcagtggatagaactcatccctcatggggcatgaaacaggccccatgcactttacatcacccaccaataaaatttagccttatgcttatcacaaatccttcctctagggcctagccttaagctccgtttatcagccagtagaactcattcttatttcaagggtcacaggtgctttgctaccttgctagggcatttctatgttgctatgcctaaagctttgttgtggtaattgtcacatggaaatctttttccaaacatttattatgcttaaatgtgtaagagaataaaccatgaaggtcagtctctggaacagattttgactcagtgccttcttcaaagatgctactgacttgagttgtgagtttcattcttcacctcatgtggtctccctgccagctgtgaggttttcaagggcaaggaggggctgtgctggtatttgcctgcaagtctcttcttcactacattggatatgtagttatttagttcataagataggactcatgccccactttcttagttatgtgttttagataactttattacatagagctgactgtattttacttgttttaatacttttatagcatttgtttgtacactactttctctgtgtacataacaggattttatttacacaacatctctgtgtatttagtagggttgtgtttatattgtatccactaagaagcatattcagggactgggaggcaggtctggtcagtgaagtgcctgctgttcaagcatgaagacctgagtctgggtttgctgcactcacatcaggagccctcgtgctggggactgggtggacaggcagatccctggagcatctagtgaacttttcatctccaaaaggagggtagagagtagtagaggaaggcgcctgacataaaccgctgacttctgtccacatgtgcatgtgagaatgtacacacacacacacacacacacacacacacacacacacacacacacacacacaccacacacacacacatctttatcacatgtggtgttcaaacatagctctgcagttggcactccaggctggacctcagtgttgtccgtggatgtatgtaggagactaagaatgtaactggcttagcggtgtatgacaatgccatttgtttattgccgcctcattttatctgaatggatctgacttccaaagagcacaggccaattattcataatctggtgggttgtagttgatccacttgctgagaactagagtaaatacttttctagatactacaatgaagtaaatattaaatcataccatgaggtggttttaataaaaaggacccccataggctcatgtatttgaacgcttgctcatcagagagtgaaactatttgaaaggattacaaggattaggaggtgtggccttgttggaaggggcgtgtcactgggtgtggactttgaggtttcaaaagcccacaccaggcctagggtttgtctctcagaatgtagctctcaactactttttaagcaccacttgcctgctgctctgttctctgccatgagcataatgagagcagcctctcatactgtaaaacaagcctccaattaaatactttctttttttttttaaagatttatttattatgtatacagtgttctgtctgcataccagaagagagcaccagatctcattatagatggttgagagccaccatgtggttgctgggaattgaactcaggacctctggaagagcagccagtgctcttaacctctaagccatctctccagccccaaatactttcttttttataagttgccttggtcatggtgtctcttcacagcaatagaacagtgactaagacagaccatcagtactaaagaaacattttcaaaaggttaaaagcatgcagtatgtcaatatacaatgaaacatgtgctcaggattttgtaactgggactttcagggtgaaagctggggctatggcagcctgaacaaactggccttggacacctttcccagtgtgacagttaaagacatacatgactgtgagaagcagagaagggttcatcagtgtggccacattgggaagaggagcaaataaagccccataaccctgagtctgatcttaaagtactgatgtgagcattaggtttcagtggggaaggaattgcagccagggccaagaggtatacataaacaaacagttctggtcagggcatcgtctgattggaaattgtctgatctctgtttctgaaaggtctttgtatgaagggactagtctgtttcctacaaggtcctgattcaggccaggcctctcctatggcctcacaggcagggctagttgctgacctctggggtaggaaggtgtctgtcattcaaggttctgccatcccggatcacagaagactcaaaagtaaaggagacagccgacataaaatagacgtcagacgtcaggggtcaagcttccattgtctggttacttgtggactcagtgaggattcattgccccccccccccactgcaaaagctgattctgagaaagtctgttccagttctattcaacttaggtaatgtggaagttacaggagaatttgaagaactggagaacaccctgttatgtatttttcttccaagcatttctagaagacaccatttacaatgctgtggaaagaatcacttagagttactgtcagtgaactagtgaatggccttactgagtcagatgattgccgaggttcttctagttaatgtacagtgcagcattcaaaggatgcttgggcctctcttgtccattttcaactcttagacagtttttgtgagatcatttagaagtatctttgagcagtttcattcattgaataattacagacttcgggtctgagctaactgctcttttcttttgcacagaagcctgaataagaagaatgtctaggagtgatagggggtgtccttccattctcctcgtctggtagccctgcccttactttctgcctggctactggccaatcagcatttattcatctaccagttagagaagcatatattcacagcacacaggacattctcctcacaggagagatatgtagaattccattgtctgtattgtgaccacaccattcaccccacaaagcagtgttggaacgactgtagccaaggctgttcaccattctgacttaggtatttctgctaataatctaataagattctgtggatttagtttctttgagagagagagagaggcagggcattgattataattatatttttagtgggaagtttaaatactatgaacacctaatgtatctacaaataactaaaatgatatattctctgaactgagtcattttaagaatttggataggcaaatcttttagttgtaagtatgaagtcagtaggatgagaatcttaccatgtggcagccacacagaggagagtgctttctttttagctgtagaaaagctgtttgtatttctttgtttggcaagaggattgatgtatcagagccatccgcagaattttgagtcctttcagacattgacttcattttataggtgaggatcctgaagcacataggagagacattaaaaataataaagctgtgttgctttaaaaattgacctaacgatgtaaggtgtttcttccaattagttaaaaacaatagtttaactaatgcagcaatagtaaatctttccacaaaaatttaaattagttttttttaatcgttagctgtatattttaggtattttcttggttgcaaaagccaagttgtattttacctcatgaaaagattaggaagtaaggtgtggatctgaggatcccaggctaagaacagactgggggccagttgatttctgagcacacatggcctgtgacattaagtgtccctcttgagcttttaccatgcatctaggctcttgtagacttactcatatttggctcctgaggcagagagcctcattggaggaacccatcattttaggtagtaacaagaaaccatgactcttggccatttcataaatgattcttttttaagtcaagaatttttttcaggtttagttagctatatctgtgcatggagttgtatcaggcagtgcagaaatgtcagctgagagacatccggacctgaggggatagcagaattctccaggaagagtaagtgagtgatactctgcaggctacttgagaaaattcattctcctgagtgtaccttgggagtgaattttacatttgcacacacacacacacacacacacacacacacacacacacacacacacttttatggggtggagtttggggagagggtagtacccaggactgaacccaggagtgaacccaggactgaacatgtgttctgacactgagataatctcctcagccatttcattttcatcttgtctggggcacacaggaattgttagttcatcttacattcttaacttgtttgctatctttgcctctttgaggaacacaaacatttttgtgtgtgtcattggcacactttgttatggtagcttggtttgctaattcatgtggaattttcttttgaagatattacttcaaaggatttggaaagtactttaaatgaccaggttctcattgttcttttaatttctggtaaatacctattcttctccatgtcctaaaagaacttggcttcaaaaggcaaggccgttagatttgtttctaaaacagatattaagtcattggacttaatgggctgcagggtatgagctgcagggtatgatataacttacgttctgaggactttttggtgagggagacagtgtcactaatttcaaatggaagctgcttagactataatatgtaagaattgtggaaagaatgaaaagaatcaacaatttttaatcctattttttgttaaagggaaatatgaaatagaaatagaagacattaatttcagatgtaatatgaagataattacctaaatctaagatttacttataaatatatatatatgtacatatatatatttacatatagcattttgattaaaaataatgaagaccaaataagatctggtaggtaatttgcccattactgtgagttatttccatcacttttgctagcagaaagtagagagatggcattttgggtacctgaaaggcagtctcctgtcaatacattttttgaagtaaagatggtttcaccagtgaactgagaaacttggtttgctttaatgtaactaatagcagacatccacttaggtgttcaccaggtgctcaccagggtctgttgcattttaagcacaaaggcagtgtgactcttgtcctcaagcaactctgtttcagtaccagtaggaaggttatatttggtactcctatgggtagggatttcaaagcaactcaaactgctctcatcaagttggaggcctggcatgttactgaggtcactctagcaaggcatgggctgagtatcattttggcttgtaaatttctcagtgaaaacttcaggacccaaaggcatatttgggccttcaaggtaacatagggattaggttttactttctggaaagaccagtgttgacagaaacaaaagcaaaccatatgaggttgaggatagaagcttgaagtaaaaaaccaaatacaggttaaaaggtctatgaggccaactgactgattacattttgtacttctggagtcaaattatcctgcactgtcagtatcccccttaatagctagctcatcactgcccactttcatgtttgaccatacatctttgtgatgagtagacaaatcattttggaatatgctaacagatcactagcttccttttgttcttcaacactgttacattagaacatgatacttggggctgcccgatttcattttcctgaaaatgcatatttgcggtcatgcatatttggttcactctagaacatgagaactgtgtcttcttggatccagaagaccctgttctttgtcccacatatggttgttcccatcagtgaaccacagaagagtgttgcttggcctcttaggcttggctcgagggtccagatgaagcccctaacaggtagtagttgtgtttgttggtgctgtttgcttatagtttgtcatctctgtgtatccctaccatttgcccagtgcaatgaggtagtgccttttcttctcccccccacccccctacccctgtgcccaacttgattactcttgagaaggagtgctctgaggtcacactcccatcggcattgtttccaggcttttgtcagttttctgtcattcaggaacatttcctggagttgtttttactcgttccttaagcgtgcatcctatctctctggaatccccctgctccaaatcttttcctttcactcccacattttagcagattacaattgatagctctgtcttcctgttagggcacctctgctcgcaaaccccactagtcatctgttctttcctgaggaaaaagggaaggaaagctagcttcagaggcaagttgagaaaggctaaaagatgggtacttgataaagtgggtttttcttttacaacccagcccagcccctcaaagaagagagtgttctctgttccccaggagaagcccaacattctgggaattcaggaaaagcttgggagaagacacctagtacaccccttgcatgttctcttgctaagactgcattgaagggaacatgaaggcactcctgaggccacttggatgttttccctgtgaccagttgcaggagctagcagcagaagccttgggtgattctagagtgattcacagtgggctgtgaccgctttggggtcacatatcagatatcctgcataccagatatttacattacaattcacaagagtagttaaattacagttatgaagtagcaatgtgaataatcttatggtggggggggtcactacaacctgaggaactgtattgaagaatcacagcattgggaaggtggagaacactgttctagagggagactggactgtttagccctgagagccagagaatctgcctggtgtctttggacaccttaggagagatggtagggtttgtaaaggctgttcttcacctattagcgagaaagaagggaggtcctggttaagctgtcttcactggggtgctagtggccaggttaaactgtcctcattggggtactagtggtctggttaagctgcctttactggggtactaggcattaaagaaggaaaacaataacttcatattttgtcttttatgctctttaaagccagactcttaattttcacaatgtcttgtttgtaagaaagcttttccagcttttaaaaaaattgttctaataaagtacagtcttagtgggaaagtatttaaattgctcttgtgctattactggtctcaatattattcatgtctaattacacattgtctctctccaagagtgaataactgaactataattggcttgcatcaggcttcaaaaacgaagaatgctggctgggtttccacagtgtctgtgcatggcacataatggtgacacagtggcactgcctttcagtgttgctttcgagcagccactgcctgttagccaaccaactgaccaactggccagccaatcagattgttatcctgtaagaaaaccttggcactccctgatgaaagaggatctgcaagggctggccctacaaatgtaaaaccggagcttgctggtgtcttagaaaagtcctgtgagcttttatttcttttccgcccccagctgtggcttttatgtccactcctttctgctcttggatcttttcttaccccatcatgtttttcttgggagcaaatcaccagtagtaatcacagaggtatttaaatattgccataccaggattctgaggagtaggagaacccccacctgcaatcttctgcgtgtcactgggttcatttctgccttaccttaaaaaatatttttttcaaatgatgattacattttcccccttccctttcttctttccaacccctccctttcattcttctcatccatacttctctcaaattcatggtctctttttctttaattacacacacacacacacacacacacacacacaccacccattcattttgcgtatgtctgtcatctcaggactgaccacttgtgttgggaagaccatttcttctactctcagcagtccccaattgtctataattctttttctagtgttgagctttcttgagccttctctcttccttgttagtttttcattggtgtcattgttgttcaggtcttgttaagtttccctttttgactagatcctaaatgaatgtttaaagtcatagcttccaggataactggggcttccactgtggagacatatatccattcgtgtctgtctggttaccttgcttgtttagtctctaaaagaatttgcatcttcacaaaaaatgcctccattgcaaaagcaagcctcccactttgtgcttgccctatactgagtctcacacagtgagctccccagggtgcccctgctgccctcacaggtcagctcatttaaattgagctccttttgctttctgtcttcaagctccttgctaacaaaacactttttccatcacccagagagaagggaccccaacaccctttgtggagttcagagtccaaataacttgaaactagaagatgaaaatgttactgagtggttccttggaggcttcatcacgaagctagagctgtcaaggtcgatgctgtagcccaagtagttcagcaagcttgatttgggaccctttcccctctttcctggtataacacgagagaagttatgtagcctctgagttgtctacatctgattaggttgtggtttcaaggctccttcagcatcccaacccattctttcagggattgaatgacagtcgattatagttgaggtacagttttatatttataattgaggatgcaggagggtcttttaaaacatatatcttggttaccacacatatggtttaaaaagtagttactatttttttcctcaagtggcaaacagaaacttccccttttgaactgttcctgttttgaccttgctttttgaaattacttattataaaaaggaaatattcatagaggcttaacatgttgttggaagatggtgttcttggggttcctcaataactggtggtacctgcattcatgagcagctgcccgtgaggaacactgtgttcgtctggtgtctcttgttacagagaggatgtagaatactatggccacttagcaggtttcagagcgagcatttgggatgaataaaggcttcttttgaaaagtcttctcggaggtgcagagtaataagtatgcctgctttacagagacagccttcggtttgttgacagtttgtaaggctggattctgaatggcatgagtcttctgatttaagtgactctgggcagggactacacaacaaatcctgtatgcatgtgctgtggacactgtcctttgttcatagcaccagtggtcctgtacgcagcttgcctcacctacaaagtcacactgtttggagattcatggttcctataaactggagggaaccaatcttcagcatttgctctgagaattggaaggccaagtggagtggtgccagagttgtaatcttcacggtttgaagaaatatgcttgcccactgttccaatttctcgagcaagttaacagttaatctgaatggaaaggggacagtttataaggtacatgactggaaatatgacgatatgcccttagacaggtctggtgtgtagtgttttcctagcactaggcacaggcttgctctgctcgtttgcccaatcacaacttggtccctctaccaggatagctggggtgaagttggcaaggagggaaggccatttatttctcagtgaacagataaggaggggtagtgatgaccttgggtttctttccttataagcagctcattgtatgaagcatgtactttaattgacttattttctcctagactggatggaaggctgatgaagaaaagtagcagcatgactgaggtaaatggttgtttcattcttttatgttctagtgtctgttctgggtcttctgagacaatctaaggcaatgattctggccaacttaaatatataaagattgtggggattacagatgaagcagtcaagcacacattccacttaattaatgtagttatatatgtatattgaacaagcacaaatttacacttttcttccaagtgtataattacataaattgcaccagtgttttcactgtaagagtcatgtttcagagtgttgactgcacttcccacatcatggtatagcatgttcactgtttgccacccagactttttggactctttgtatgatgctggcgcctgagtcttgagtccaaagtgcaagtatccatttgtgtaatgtaggacagttgctggcttcattcttcagacttgtaaacaaccaggatctccatttggaacagtttatgtaactgtttttatgagctcattatttttttctcccttgttttcttgttccttgttctccttgttcattttatttatttttgaagtcattgcatatacattggtgtcttagttagggttactgttgctatgatgaaacaccatgaccaaaacaacttggggaggagagggattatttcagcttatatttccatatcgctgcttatcattgagggaagtccggacaggaacacaagcaagacaggaacctgaaggcagggtgtgatgcaaaagccatggaggggtgctgctcactgggttgctctccatggcttgttcagcccactttcttatagaacccaggaccaccagcccagggatggcaacacccacaatgggcaggtcctcccccatcaatcactaattaagaaaataccgtacatggcttgcctacaacctggtcttatgaaggcattttccttactgaggttccctcgtctcagatgactttagcttatgtcaagttgatataaaactatccagcacaattggttaatagtttccaatctcccctttgacaaaaaataggcctttcagcttttttggttatattttctggtatccatgtatctatcggtttcaaaatatagaagataccttaagtcactttagtggtttcttcaaacatgttagatatctgttctgttacctgctggagatttaaagatgacctttgactgttacgattcacttccctttcctgtcccatttctcttttacttctcctcttcctcccccttttcctttgctccttttatcaggagtggggacggagtgtgggcttacactggcctcaaacttggagtcctcctgtctcagcctctgggactattagatgtgtaccgccatgtccagatctccatgtgtcttagtgcagtcatgttccagactgcattttaaatattaatatttgccaagttatgataaattggtaaattacttggtcttggctgagcattgtgatgtatgttggcatgtaccagccattctgcttcctagttggttgtgtggggtgttttatgggtaacacttttcttcatcccaagaattcagaaattccatgttgggggctcccttccgtaatccctctctcctttccctcccttcttctatctctttcttgacatttgtagttttccacttagcaactcagtttgatgactttcttgccctcgtctatcatcaaggtcagaaatgatagatcagtcttacactgtatgattctgacctgctcctctgtctacccttttttatttctcagaactctgtgattacattgggcccatttatataatccaggataatctctccattcctctttcattatgattaaaaaaataaatcacatcatttattctcttgatcatatttagtacaaggtaggtagtgttaatatacatcttgttttgtaaaagatcttgagactttttctcatcctggaaaattataacttacatacatagtaacaggtctttctctctctccctcagcccctggaagtcatcactcttgctcttttttgtcagtggactctgttgagtctctttgaagctgcttacttcctaatgacctgaccattcatgcatgtagcagaacatgcatgagagaatcttcttttcaaggattgaatactattccattgacaatactactacatttttcttattcatttatttgtcactagacatatagtatggtgtcttctagtcttggctattgctcaaactgccgcagtgtctttaggtatgcaaatacctcttcaaaatctcattttcagatatattcaataagtggaattactagatcatatgatattctctgtggaattttctgaggaaatctctgtgtgttctccataccagttgtaacatttctatcccttcacttgctgccatgtggttcattttgtacatgtcctgcctcctctgcatctgactggcatctcttctcatctcttatcttctcctctcctttctcctctctcctctctcatcttccctcccctcccctcccctccctccctcccttccttcctccctctctctctgtctctctgcccttcttcctggcatcctctatgccctgaaaatcctgctactagccatttagcctatttattaaaccaattatagtgaaatatattcacacagcgtaaaggaatattccacagtattatttcaatatcaaggtaaactgaaacttctatcatacaaagcaatatgaatttattatttcctttttgaattattttctttgcatttggtggaattttgaatttattattccttttttattgaggtaaactcatggggctttggctttaggtttatgtgttgtgtgttgcttttactaacaggtggtgttctttatataataaataaatttatatctctatattaccatgaagctttacctgaatactttttacagtggtgagaggggactaggctttaaaatttttgtctcatgctgttaactaagatggctgctttttttttttttggctgtgtttggttattgtggttattgcaggtcgaacatgctctctctctctctctctctctctctctctctctctttctttcttgagtgtgtatgtgacagggtcttacaatgttgccttttgccctggagcttgctatgtagaccaggctggcctcaaacttagaggaatctgcctgcttattcctccaaagtactgggattgaaggtgtgtgacactctgttgaagtgaacatgatgtcttaaaagatgacagaactgggttctaaagaactgtcaagagtgtagttgcttttgccctttgagttgtttattgacagtaggccagggatgtgacttggcagtagagcacatgcctagcatctggggggctcaatctcagcaccacaaagggaaggcggagctcagcatattggcgtgcccaatgtattggctatttcaggttagggttctggagtggcttcttgaaaatttgagattgaggcttagaaaggccttggattcattgtgggctttatgtgaacctcaaaaagatttaaatagaagtttagagattctaaaaggggaggaaaaagcgaagaagggaggtgagtgtcttagtcagtgttctattagctgtgtagtgacacgatgaccaagacaacttacaaaagaatgcatttgattggggccttgcatgggtccatgaccttcatagctgggaacacgtgcaggccaatagccatggctgctacacaagagctgagggctcccatcttaccctcaagttagaggcacacttaatagactgtgacacctgtgggcttctggaacctcaaagcccacccccttcccagtgacacaccttctcctgcaaggccacacgtcctaatctttcctaaaacagttccaccaactatgggagccattctcattcaagccaccacaaaggttaaggactttgtttttaatgaagaaaaaaatgagttatatctgttttatgataataaaaacggaaacagcacaaaatagaaaagctgaagcaaagggagtggagcggggactagtggaatatcttgttgttttcaagttatttaccatcgtagtgcgattcttctgctgagccgtcctcctgcacttctagggttcttttagctctggaattttatgatgctttttcaaagttaatctaaaacttttcccatggtctaaaatcacctttgagttcataggaatgtaccatgttgtgtggctgggaaacttaatacctgacaagacctgcctcagaaagcacacatgaggattatcataaaagaacgggttgctagatgcgaaatagtagctgtccgagtgtggcctgaacctagcatgcctacctggatgtacagagccaggcaccatatcctgtgggaatggggccagtgcttaggactggaatatgccagtctgttctctaacctgaatgtcactgttagctctgcctcagttcctttatagcccttcccattgcctgtgggataacaaagagccagtgagcttgactctggccagatgttccggagggaattactggctggacactgcattggtgtcttttctgggaatagagcagtttgtgttgaacctcagcaagcctgtaacctccaaataagcttttactggcttttgaacttactcaggtcatcactgaggctgtctggggtcgggatctgctatgtggactgtactccatgggaatggcaccatgtgctggtccttttgaaactgaatttaagaatatatgtttaattcttgaagaatttccaagaattactattttcaccatttgctgagatgattgttgtgagacgttattaaaaatatatctgtttttgatgtaggctctgctgtgatgtctggtgtcacatttaccctcatcctgttcctttcagtatgaacctagtgaggccagtagcggagaagaaatgatgagagttttctagaaatcttacatagttcacaaacttatttcagtaattgaatccttttcagcagagggctcctggaactgaggtttatcaaggtctggggtcaaaccccagcactatagatataaccaagtgaaaagcaaggcatctacccacataccatgtgtccacttggtgacagctggatttcaagagattgtccgggaggactcagacttgaaacttacaaacatgtcaacatgtcatctgttctttgttgtgtttgttttaaaattatgggatacatgattttaaaagcctatgtaactaggctttaggaatgttaatgagttagcagtagctatctatgctgatatgtattttaaccatttttttttctttcccatccctggtactgggaattgaacccagacatctctttcatgtcaggcaagtaccctaccactaggccacacccccatccccactgatgaatattttaattcttcactaaaattccagaaataggtgtggctgcttactgtaagagaccagtctgaggcttgtgacgcaatgaacctgcctgagatcatgcagttagaagatgaaggagcccacactcgagcatagacccatttgatttctcagactggttagccctgcctcacacacaacagtgacatttaggaggcagccacacctgagaattttcttacatttcacatccacgcaaaggcattctcaagctacggtgacagcattctccttggagaagtggaggctgctttttggccctggtgcttccttatagaaagggacatttctagcataggtctggaaggtgtggctgcttgtgaggtgtgtcatcctagttgaggtttctcaggatggctcacgcctttattcccagtactcagcaggcagaggcaggcacgtctctgattttgataccagccctgatgtataatgagagttccaggacagccagggctacgtaaagaggcctttactcaaacaaacaaacagagcaaaataaaacagaaaaccaccatttagataggtgcattggtgttaaactagggtagtttgaaacctctgtttctttctctgagtgggcagcctgtgtgtgacaagcacctaaacctctcatatctcattttcaagtagtttagctctctcattcactgtgctagttaattaaacttcttttattgtttaaatatttcccacaagccaaccccagttaggtcaggaggccccactgggccaaagaagcctcagaccttgggagagttcctgttgtagaccttcttaggcacagaggtctgccatcacagttgacaggaagacagaaaagggaacagccaaaacctatgttgtaggactcagtttagtgggagaaagatagtaagttccataaataagtaaaatacctgtgtgtctatctgattagggtgggtgagggagagaggggaggagggagtggtgtgtactgtgtgcacgtgtgtgtcaacatgccctttctcatatgaagcagggaggccatgaggtcttgagtgtaaaggtactgtccaggtatgggcataagcaaggggtgagcctgcttacatatggggtcagggcatcccactgcttacatctggggcacaggcatcccaggcagaggtttaggaagtacagagcttgagacttcccaatggtacactcaagccaagctggcccaaacatgtcagagtctgcacactcttcaggttgctctaaaaggaacgttttcttcatcttagaaaggtttccagtacctagaaaagagttttttacattataagcaatgaaagcttagctggctggctctcagaccaaagtaatggacaacagataggtagttggattacatgttgttgcgttcagataacagaaccttagaattacaactgtcgagaggttaatggtaactcaggaactagttgtgctttttctttttaaataaaaggtgttttccttgaaaagttttaatattctaattttaaatatgaaaatttgaatgcctgacattttagttttatggaagttgataaagtgtgccttaggaggacgtgtgtgtgtgtgtgtgtgtgtgtgtgtgtgtgtgtgtgtgtgtgtgtgtgtgtaaaacagatagaaacatgggtcattttcctccatttggctcagaggccttcctcaggggttttatgatctgagcctgcaggaaggtaattgacaggatcttcctggtccaagactgctttggtgaggttagtgtgaccacccttgcctactcctctccattccctcagactggggaatagtgactggtggctgcttcacccctacaccagatgttggggaggggtgggggtctgggtgagtgatgtcaggggaagagggtccagcccctgggctgatgttgtatggggggcagggagtttagcagggtggggtaggatgggcgtgtgcggagggttcagcccataggtgctgctttgctttcttggccaggatgaagaagagatgcttctaaactgattttaggtaaactgatggccagtgaacatgctgtttacagtgctgtgattttgataactccgttaagtgtggccctcatacctgtcttaagtctcttgaccaaatagctttgctgttcggggactcccagccttatttactgaattcagtggcagcacagatctcctttagtgctaatgttttagtggcatttgctccagaaccattttttggtgatgctgcagtgtgaagaatgagaatctgggccacaggaagcctctcctctgtgtggactctccattctgttgtttaagaagggttttctggtgaagggcatgccagaggctacgatgctgctggtttggcatccatgggaagtagcccattttcaatactgggattccaaataaataacagttttcttaccttcctctttctctccacaagagtttccccctgtgtagagaaagatacatttacacttaggactctcctgcctccacctcggagtgctgcagggatcaccctttgcacgagttttctggttccacctgatgccagtttttgtctcgtatttacagcctcaatttcttaatggattatattcttagggacatctcaattcacacaggaatagagtagatgtttagaggtttattcacccttgtcctgggtgttcctaaccttccccatcatctgcatctcctgtaggggtggcatgcttgctacaagttgacaagcctacatgggcacaccttcatcacccaagattatgaccactcaggctgtaccttctctgaatatacagtgacacataaggagggggttgaggccatttgggtgaaaaagtgaagagcctcgaggatgaaaaggaggaccacctggaaagaagggaaggtctgtggtctgcagggcaagaaatcagagtgactcaggaagctgcaggaaatcttctgctacttcaaaaactggactgggtgattctttattattgaatcctagtggcttactctggatacacgttcaatgtgtgcctggtgtgtaattggcaattattgattactttttcagtttctttgaaaaggtgggcattttcaccttgatgaagtccaaatgatcacttttccaatttatcagtaacagcctccatacattacagttatgccttggcttgctttcctatggatggtttagttttaacatttaggcttaattgtgttaccccactaatttctgtttatgtcatgaggcagtgatgagggtccatcgttcctaacatgaaggcatctatctagtcctggtgagtttgctgcaaagattattccctacatccatcaaattattgtgtgtgtgtgtgtgtgtgtgtgtgtgtgtgtgtgtgtgtgtgtttctgacctctgttatattcctttctgttagtcattcgtacttgatgctgtgtttttctgggagcttttttcttcttgtctcataagtgacataaatttagaatttttttagtcattgtctgggtttttattgaggtcagcctggcatattcttttcacctgcttattaggctgtgtctatttaaagagcatccattgtagataagggtgtgcattggtgtgttaccagtaaagcgctctttggtaatctacatctttttgttctaatacttaatctcttctcattggctgcagttattgtcagttagttttagttcccccatttaaaatttttttatttgcctagcctttttaaaattgttttttttctaaatgtgtgtgtgtgtgtgtgtgtgtgtgtgtgtgtgtacagtgcccacagaggccaaaggcatcagatcctctggagttggggttacaggtggttgggttgtgagtccctgatgtgggtgctgggactcagattcagatcccctggaagagcagtgtgtgctctcataccactgagccttctctccagcccagaatcccccccaacacacacacccttctccttcatgtgagacagggtctcattatgtagctctggctgtcctggaactcactatgtagaccagagtgctgggattaaaggttgttaaactatgccgggcttgatcctgtcttttaagacttttttttttaaattctctttctttttctttttatttaattgaaaaatgttaacattacatttttatttcaagtttttaggtatttctctttgcattgttctatttgtggcttttttgtagattaaagcggttatctttgtaaaactcttaccttgaattaatattgtgttgctctgtgtgaaacttaagacttgtggcatctctttttctcctttacgtgcatcggctctcattcatccatgtatgctcatgcacatatgtcacagactaagcatcactgtaacatgcttttgatagactgtaaaacgatcaggaattccctttccaagaacagagacaatttgtcttctctttccatgtccacaattcttagctccagatcccctcatttgttaaaagccatctgttctgcacttcattgagtgtttatctactgaccacaaattctcaattttcattggtttaaaagtgtcatttcttctttagtttcaaaagatacctttttgcttcttatgcaagtctagctgattgacccccacacctttcttttctaacactgttttagaaatttttgttgctactttggggcttcattttcaggtgaagatttcttgtggttaactgagtttcctgctgtgggacattgctgtttgggctgaactttgaaaattctggccagttttttttttaatagtcttttttcccccatatcatctcttaaaaaatgctttatcatcaattaaagtcatagtttttttttttttccccacgtgacggcatgggagaaatatccatgtagtttctactggagaacgtgtgggttgctcttcctgctcttatggtataaatctagggccagtttccgtcttcaaccggccatatcacattgcccacactgcagacagcaaagcctcaaaacgctgtgcaagatctgactgctgatcgttactacccacatccttgctaggcagagctggtgcaagcagcagagctttctacttagtccatgtctgcttgcctcttttggaccagaagtctgtgccagtacctgggaagcagacattgcccagagagtgacatggatactgataggaatgtatactgtgtgccatgatcatattgagatgtttgagagacatttcttggagaaagatattggcatcaaaataaagagttaggtgagaaaacgggagagaaaacgctagggacagacttgaaggtagaggacctataaaagacagtcgtctttccttagttactttgaagtattggggtgatttttgttccacaaccatccatgtaaaatatgtgataagatagggtaacagtttcgaattatggacaacagacagcacgttttacaaaatgttttttttttttcaactaacactgcaagtacatcatctcctccatcctgacccctgtctcccgcagtgctgaactcactggaatatggagcatatgggaccatgaatccccaggaacttgttgcccactgaacggctgcagtgtgctgggcttttcaggacagcctgcagcatttctctattcctatgtttgggatgttagccacaggtttcgttatagaggctggcagtcagccagtcacagcctgcaaactgaacctggccaatacctattcttgctaatacattttagtgcaacacaagcatgtccattgatttagaatgttctctctaagtattctcatactgtaatgtgtgaaaattaagtgtttgcagaagatgccctatgccagaaatctaaaactgcttgcctgttgtcctcatagaggacactgttctgcctccgggcttagcagagtccacattgtgaaccttgtatcattcctctgtcctcatcctgtttgtgctcttctgtgtcattgatttttcctcttcctgtccacaaccaggcatccatttgtcatgctgtcacccagccttttctttctcctctcctttcctagtagttactccagctgacacgagtcaatatatttggggctgactctctacttaggtcatgtcacagtgtatttctgttagtatttgttttttatcacttttcacttaaagtttgatatctgctcacacttgaaaggtttttttatttcttggttcagaatggccgagaggagaaaagcacaaactttgcctccgctgaaagaactgaagttgagcctctttgcttacgaagggggctctaactcagtgcctgggaacacaggctcctcacctgttcctggcttgtgggagaaccagagcctccctctggatgctagtatgttcattctttgttgttttcagtgtagccaagggcacttagtgatggagtttcttctctgtgaaaaagtaaacttaacttctgaatttattgttgaaaaatggggctttgtgagtttttgttgttgttttgaaatactggtacagtaacacaaagacagtcttgttgaatttggcataaataagaatcataacgcttaaattttgtgaattaaaatatctataaaaatcaataatattgaatgaaagcctttttagaatgtatttttaaaactaggaatgcagcattttgagggaggttgtagagatcaataataaatttagaaattacaggtgtttttattcccacatgactgagctaggggtaggtttttgttactattctttccatggaagaggtgtcatataggacatgacaatacaagctttgccggattgaagataacatgttctttcctgtcttacacaaatcatgaaactatggctaggaaatttcccatgagtttacagaaggtgctagaataggagaggtgagcaagtgcatttccttccctgagatggagccagtgtgttcagctcataaaaggtgaaggaagcctgggctctctcatcttgtattaccacctgaagcggagtaagagcaaatgagccatgcgtgtgtgtgtgtgtgtgtgtgtgtgtgtgtgtgcgtgtgcgtgtgcgtgtgtgtgtgtgtgtgtgtgtgtgtgtgtgtgaatgagccatgcgtgtgtgtgtgtgtgcgtgcgtgtgtgtgtgtgtgtgtgtgtgtgtgtgtgtgtgtgtgtgtgtgtgcgtgtgcgtgcgtgcgtgcgcgtgtgcgtgtgcgtgtgtgtgtgtgtgtgaatgagccatgcgtgtgtgtgtgtgtgtgtgtgtgtgtgtgtgtgtgtgtgtaatgagccatgcgtgcgtgcgtgcgtgtgtgtgtgtgtgtgtgtgtgtgtgtgtgtgtgtgtgtggacatatacatatataaacttaaatatctactggtaatacagatcatgagaacatttcttcgccatatatagaattttccatttattaaagaccaaaacatcatttgcatactaattgaggtgctgtgcttgtttattttcacataaagaactaaatctttgctgaatactggatgctataagatgaaaacatcctcagtgtttttcactgttgattgatattttgattttataatcatcagtgttgagaacaccacttggcataaatatgtagtacaaaatggcagaagtatgtttagggccatttcagaaattggaaattccatcctaatcgcaaggcaaaaatagtgattggatttagaattagtttacaggtagcagcttaagcagcaattttaagaattaaaccctctaacaatccaacccaaagatatactaattttcttatttatatgctgcagagtgatggtaggaaaacattagaagtctttgttttctgtcactaaatgtttacatttctgtaagatctgaaaacactgcagtaaaagtactgcagtcaaaaacatgatagtctcaaatccgaactgagacattttcggtggcgcttcttggcaacgtgtggtgtgactgcgtgcacactgcgaagtgtgcatggtatatggtcagaactcaggctgccatgatgttccccaagcatcaagagcaagcgctgccggaagcacctcggctgcatcacacatttcattttgaattaaaatgtgatatccaagggatggtaacacagtgcctgcagaagcttaagtccttgctgagcggaaactgctggctacatggggaagagaaacccttgtttatttttggtttatcccttcatggtctgtggagaaggagaaagttgaaaggctacatggattttcccgctgggaaagttccgtaacaggggttggagacagttatgaccccatttgtttggattgcttccacaacaccttactggcagtatcattacacagaagagcaagctactgtttccttttaaatatagaggtatctaggaatgaagacagtcctggtgtgcattctgatcagcctcctgatacacatgctggagatacttctgtgcatcggttggctgtagcaatggggttacttctgttgaaaatgccagcaagcaccgtttgctgatagccagccaggtgcctgtgttccacacctgttatgttgctgtggatctagacacctgccaggtgtttattgaacaaattagtaacttggaaccagcatacatgaaataattgaacagtcttgctggcactttttaattttcttctttacttaacatagggtaaagaaagagaatcaggtcattcataagaagagcagcctattttaggtacactccaccttactcagagagtactgtgcattgcttttgaaaggactgatcatttaacatgagtgttttatgaggtggtaccacctcccctgccccccccccagcttagctctttggaagtaggagctgtctagtatgtgaaaactttcctcacacagaatatataatatcactttggtcacgatttcatgtctaacatttggtaggactcaggatgaagagtcttgggaaacaggaaggtcagaactgtgtttcggagtaaccttggacaaatcagagggtctttgggtgtgtgcactatgtctgtcagctgcaaggctgggcctggataagcaatgtaggttttctcccttgcagaggatgtgactggggggtgacctgcttgtagccagctgggctctgaggtgagaggtttttttttttttttttctcagagagttattcttagctgagtacgttctggccatgagttgaggttttctgaactgatttgtagaggttgtaggtacttgttcagaagattttaagtatgggtatatgcgtgtgtctttggttttgagagttcatattagaaaaaatagacaagtctttattttgattgagttcttaaagtcactaagagaaagtttctagcttgcctcttaaacagtgtttaaatacaatgcattatatatagcatgctcttgttattctgtgatggctaggtctgcaggagagcttgtctattggtaaaaattctcttgctgatctcaacagcatgctgaatcacctttggaggccagcctagagcctgatcaccatttagattattttggtggtaaatgggactgattatatccgccaagtggccagcctaggaagggagtccttctctcctgagccctgaggctcactgggcctccttcttcctccttcctcttctgccagagggccatgagaaggcatcgtggatttgtatttctcttcccctttgcactgattatctagagacacatggccatcagcacagcacagtctttgcaggtcaactgacttagtagtgatcaagtgatcgcttgactggtatggggcaggaatctgggcctcaggtagctgaatgctgaccatgttgaagtcaggaagttagtgtggctactgtcttatcagtggggcagccggggaagcttgctcgttttctttctttctttctttctttctttctttctttctttctttctttctttttctttctttctttctttctttctttttttttttgtgggtgcttggatcaagcatcttggtttcttgttgtcaatagaggttgccctcatgtagctatcattatgtaactcacatcgtggcagcctttcttttcataaccagcatgggagagaatcctgtggcagaatggatattacaatctcctgtagtgttaacacacacatatcctgtcatttcaacaatatgctggcagttctaagaaagccataggactcacttgtgctcaagggaaaggaattgcctacagaatgaatcagaagagacagagatcacggggcactttagagtccaccacacctgagcttggccaggacaatcatttctctttccttcctctgtgcattctcctgtgtaactaactaggtttcttactgctgcactcccttctctctacctacctctttgcaccctcagagacttcatctgcccttagtgactctttcttcctctctgtctttaaaaagggaactgcaatgaaagacaatagaactcagaaaggagctgcatgctatagggccctccctctgagagtagcatttatggagttctttctaaatcatagtatgttttgtatttaaaaagacccaagtggtccctgtgctcttcatgccagcatcaggttctaaaacaagatgacattcatggtgccctcatctggggatttttttttttttttttttggtgaggctatgttgtcaagtttgtagcataagcatgttttgtctgttaactctctggctctactgactctcaatgttccaatcttcttgtcttcagtcagcttagggtgctacttcttgttgttctagggccttcctttggtctgtgtcctgtcttcagctacttctcttagcattgaagtgacagtgtggtattgtgggtaagaacaaggattgaagctgcctgggttggagacccagaattgaccatgaactgagtcatcttgagtacatcattcagttttacttctgaatggatggtgttaatatttctgaactcttcccctggccagcatcttctaattgctgttgctgctgctcctgaggtataagcacagatatcaggcagacagtttgccctttattgctaaaagcaactgtgtaccccaaaccgtttctggtcacctggtgaaatggcctggatcatactaattgatgattagctcttggagatactaatttttgttgttacgtggacataacaacttgctttatctgctaacattggggataatataacatgtagtgacactgttttccatgggctttacttaaaagcatcatttatgttcttgtaactatggtatggcatctagctgtaggaccgatgccaccaccattctattgataaagaaattaaggtgtgcagaaaatgtatggttgtcctcaagatctttcaggactcatttgggaaatccaattctcgtgaccacaaagcacatgcttttggtgactcaggacactgtttcctgagagaagccccagctttttatagtgagccagctccctggcaggaacaaaataagaaacagaaacgatctaaccctgttcctgtaagagtttctcccacctgactagccttaggtgcagttcagactctggatgcccattgcttttgaatctggccagctttcttcctgatagcctgaaggagttgctctggaaggtagagtgtacattcaaattggaatatatagttactggtgttgtaactcgtggtatgatttgtggctagcaatatccgatggcctaggtctaatgttcagcaccatatacacacacaaaagggatgcactggttttggccaggctttgtgtgtgtgtgtgtgtgtgtgtgtgtgtgtgtgtgtgtgtgtgtgtgtgtgtagttttaacattgtgtttgaagcatggtttgtgagttctaggcttgtgctagtctcaccaggactaacatatctggatagtccttgttaagtgggtcacctaacttatttgcttagttctgctggcgctcctattgtgcagcaatcttatgtgaacttcatccttgtcttagttagggtttctattgctgtgaagagaaccatgaccatggcaactcttataaaggaaaatatttaattggtggctggctcaccattcagaggtttagtccattttcaccatggtggcatgcagacagatgtggtgctggagctgagagttcttcacccacatctaaaggcagcaagaagagacagtgacaatgggcctggcttgagcatctgaaacctcaaagcctattcctggtgacacacttcttccagcaaggccatgaggtgatgggggccattttcatttaaaccacctgaatccttaagggctttaaatccccttccctgtttccagggcttggcagcatgaatgggtggttcatttgttgttggtgtaacttttaatcatttggaacaactaaccatagcggtggcacattaccacccttgatcatgattttaatccttttaactaatttattaacatatttcccacgatagcaaataaggtgttttggggccatgcatcagtggtgactttgctcaaaggagacagatgcccttatggacattgtccacagcagttctgaagataaaagcagtctgcattatgggaaggagtatcaaaagagcaatttagaagcttcagtgagaccttctgtagatagagttttaatacttagcttcaaagttggcatggtttcatccacactgtgctcagtgaaactgtaacgtggtgttgagggagatggactgcctgccattttgagcatggcccttgtgctctgtagatgccagtggagtgccccataggtcagtgcctcctatggaaatgagtcattttctacagtccagagtctatcaccatagcaagaactcggtagtgatacaacaccagcagatactcagtgctttctgctggctgttggcagcaagggctgccagagaagatggcaatttatccttaacactccactgtgatgaaaatgtgtctcctggtagcgacagggatgctgtcgctcaacaatacctcaacaatatggctgcctaaatacaacctgaagaaggacagcacaacagatatgctagtgtggaaagagattctacgaggaaatggtgactgcatagacagggagattgtttcctccccgggaatgggctccccagttagttaacccacacccagggttcggccccgaaattatatacatacaaactacattaaacagagtcagcaggttgtatttataactaataattaaagaaaagaggccatgaatgggagaggaagagggagggtatttgggaggctggaagggaagagggaaatgatgtaattatactttgatttttaaaaactgcaaacataacatcaatttgaaaaataaatgttaggaaagtttgtgttactgtcagaagtaggatgttagcctgtttccaaaatgtccacataggcagtctatgaatttactgggttgcatactattgccttttataacaaggaattgaatagtctgtactgtaatcattactagtaacatgctagttgggattttcttttgaggacaccttggatgaagggtctacacactcatctctgtgtgactgctctcaattgtaggcattctcattttacagacctggaaactgagccttagatggagcaaacaatttggcaaagattacacggctgttaaatagctaggtgtgcttcacacctactcattttaaacctatatcaaattgtacagcatttatcagacttttaaaagcttccttgcaatgtggccaggcatataaagccatagctggtcaatgagtatgccgttctctgtgttggggctttggtctttctctggagggacgttccttccccagttttattgttgttggccagttctttctggccctggatttatatggcatttcttccttctcctcccttcttggtccatcctgcacctccttctggcttgggtaacttgaaacctctgtccttccttcaggtgactattgcaatactgttgtcgttctctttgctctcagttagggcatcagttaggaaagttaagtcatgtgcctgttctgtcactgttgtctgtctggagccacatgctcttcacataaagtgaccaatgcttgccttcttcaggggcacaagtggtgtgtttctattatggccctatgtgaaaagaacaacacaaaggtcctattcttagtttgtggaccctacctgttacaagattaaaaacagaggtgaaattctgttctgaatgacttcctctttacaaaaagcaagcactttgcttggtgtattccattattgggtgaaagtacaaggatcttcagtatttgatgagctcaacatgtgggcaataaagaagttgtaatcattaagtgttggatgtccctgttgccaggacgacacctttgttggatcaaagaatgctgaccatgccctttaacttccttaactgtcactaccacacatacagtaggggatatttgatgctcatttagaaatgaagaaatggaggcttggggagaggaattattttcccaagggtctgtggctagtaagtggtagtattttgaaccattggggcttttgttgtttttattgttatctctgtggtgtgtttgatagatgttgttagtaaaggccatgcaactaatgagatcccttctcctggtaccaggtgatggaaatgtactggaacactgggagaagctaatatcttacaggaagccaagatgagaagaatctttttaaaataatctgtaagtaaattttttgttagctctttggaatgcttttaatgactgagtgaatcatttttaagaagttattgcaaaaggacagtacagtcaagtgaagtaaatgtgtaaaaactgaaaatgtattgtaagatatcagttggagaggtggctcagtggttaagagcactggctgttcttccaatggtcccaggttcaattcccagcacccacatggtggcccatcactggctgcaattccagtttcaggagatctgggcattcttttctggcctctgagtcactggacacatagtgctcagccgtacatgcaggcacaacacccacatacataaaattaaaataaggagtaagaaaaaataagtaatctagaagcctcagaacatgatgctgacacttgagaaggttgttattgcgtgtgagcctttctttgtaggacacatcattttcaggtgagtgcaccagtgctgatggacagaacaaaagtagcagatgacaggattccctgtcctagggcagcagttgaactgggaatggcacctgaaaacacaggtgtccttgctttcagggaccccaagagttcacttctttaggtagctcttgcaggtattagaagtaattatgaacaaaattgctaaatgaatacaatttgatcaattgtccacaactcttccctctccatgtgtggcactaccctagagaggatgtcacacaaatatctgctcaccattggtaggaaaccctggacagaccctgcagacccaatgcttgttgtattggggttgttgattgcaggagtgtggtctgagtgacttatggaagtggggatgaatcaaagacagctgccatcagtgaaaccctaccccagcatggctagtgattcacaaaagctggaaccctggtgcgctctgcatgacttgtaggcaggtcagtgtcttgtctgggcaactccattagcctcggtctcctcagcagccctggctgcttatgtaacctagtacatctggtcaatttccagaactcctggggacttctgagttgtttatttcctgagtcttaatgagcttccctctagaactctgagtcttaaagagcctcttttccaactttctggctttccatgagccttggaagaaattgtcacatgatgttgtatttttgaacaattgttagttattcaactaacctgctctagtgcatttagtacccgccccagttgattgacctgcgtattgaatttgataatccctagtatgacatgagagacggccatagggctttctacagcatcacagggtcacaataagtgtggttgctttctgtccgtatactccatattgtgatttacaattcatattgtgtgtaagcctttgttctgactcaaaagatgggccagctcaaacatggcagctctgtgaaaagatgctgataaatacttgaggtggcaaagtccagtaagtgtgagcactatggctctgccagagggcttctgctgccagcaggtttccgggggtgtaaacacttctatgcttgattgtagccgtctccatagaagtggccaaaggcaggtctgaaagtgctatgcactctgtcgtatgtttttctatgaattagatgtggtagttgcaaccggcatcaggaccctagtcaatggcaaaataaacaggagtaactaattttgagtgtttattatctttatttttgggtgtacgtttaagaatttcaaatttctacaattattaaagttttttatttttacttatcagtatggatatgtctctttcctttctctctccctccctctctctctctccctccctccctccttctctcccccctttctgtgtgtgtgtgtgtgtgtgtgtgtgtgtgtgtgtgtgtgtgtgtgtgtgtgcgcgcgcgcgcgcgcgcgcgcccacggagacggcattggagctggaattacaggcaggtgtgagctgcctgatgcaggtgctgggaacaagctcaggttttctgcaggagcactaagtgttctatcgcctgagccatctctccagccactgtggccaacctgcccatggccctgagaatttagctgtctgcggtagtggcatggtcagcaagttggctccaacacagcagtgtggtgggttcccattgtgagagtacatcagagcccacttctgcagttccctgtcttggctgtgataggaacactttgctttggctgatgacagcaaggtttggtaaaatccacattctcatgaccatactgcttgtagaatggaaggtaaatgccaagactaattttgaacttaagtctctgttcttggggagggggaggtcatcccactggcattattgagctgtgagctcagctttgtggctgaccaggggcatcccctgtgtcttctggctgtttggtgacaaggcttggagacagatcccagctgtgcactacctttcttcttccttctgtcccccccctatcatctctacatctgaactcctctgttggtgacacctccaggaccaggcagttggagtacttctctatacttttacttttggctcagaaatttaagttttagtggaaagcaaattgcttgcagagagaacaggcctgaatggcttaacgttcaccttggcttgattacaaaatcatagggagtaaagagccagcttggatcacctggatcacatgactcagcgtttcttctagaagtgctttctttttcagtttctctcacttgacctttggaggggaataattgaagcctggaatttcaaagtaacagcagagatcatggtggttgtttttattttaaatgtccaacaccaagctctcaaaacatttgttgttaagccattaaaataaagaaaaaaggccgggcggtggtggcacaggcctttaatcccagcactcgggaggggtgggcagaggcaggtggatctctgtgagttcgagaccagcctggtctacaaaaactagttgcaggacagcctccaaagccacagagaaaccctgtctcgaaccccacccccaaaaagaaaagaaaacaaaacaaaacaaaaaccatgggagtatttcaagcattcatttgtgtcaattccctgaatcagatttatataatcttaaaacattcgtttctctcatttcctcttaaaaggtatttctagtagatctgaggattattgaattattacaaaattcattcttgtctatttcatgtggaagcttagagttagccagagttgagatgtccttggattatgaattaattaccatcctggggcttcctcaggatgaagggtctttgtaacagaaagtaatcgtgggagtaacaattaatggggtacttcagagctaaaatacttgatttgttttattatcttgttaggatggaccttctgtggtataattctgttcagatctgctagtcgtgtgtagtccctagctgagtcttgtattatgttcagatcagcacttgttttgtgggtacctgctctcatgggctttgggagtaaattccagtccaaaaaaaccatgctaattccacttcaagagtcagtaatgaagccttaacgaagaaaacaaacacttaagttgaaagtagtaaagtagtagactttataaaagatgtatactatgtacaaagcacaaaggggagagattcattacccaggtgacaagaggagtgggttagatcaggacgagtttcagaggcagagaacattcgaattgggcatttgctaattagcgtctcaatttaactataagagttagcattactgattggaaagaattacaaaaatgtgaaaattattaaattaaaaactcaccagctttgaaatactagcttaggcaacactgggaccttgggtaaatcttggtggtgagggtgtagtgagatcttttaaatttacatgaccagcatgaagtctcagggaaatggggagggactgctttttaaaatgaggggccctagtttgcttcttgaggcagtgccctctgggtcagcacttgtgctgtagtgttgcctgctactgaacatgccaattttctttagatatcaccagctcaaatgataagtagaattgatgaagaagaaccttcctttcttcttttttttttccagaagtacattctttttatttctttagatgtgcatatacagacacatacaagacattttacatttcctaagatgactctccatttcttctacttgtattaactaaagttcataaagaagtactgaaggactgtttcataaaccttatcttcagtaacctcagcaatggaggctgagaggtagcacccccttccccatgagacctttatatttatgcttttgtccaccaatgatcagcttcacagcctcctggtgaactcgcatcattagctcaatatcatcttctccaacaaatgtcattcattcttctctgcttttcctgtatcggcggtaaaggatgtaggcaattgctgcacttgctaggattccaagtaccagggctattttttgaataatggacaagcttgtccatgaagtggccattttctggggaattctcttgtcaggagtcaagcaccttcgccttgcaccttactgtcccctctgcctggtctttaccacggcccagaagccaagcaggcagctattttgcagatgcttgcctcaccccggaggcatgtccacaccaatcaatgcctgtcttgaagtctgacaatcgtgtacccatgcagcagccaatccttgcacctgcagtcgtgagcaatgatacaggggtttctaaggccagccttgaatatagaccacaaggagcctgtctgacctacagataaaccctgatgatcagcaggaactccagtcttcaacagatcgatgctactgtttccttcctttcttctttaagcatgtgtctgacatcgtcggtgtcaggctatggagtattccaagccatgggaccagctcctgggaccccagaccgtgttgcatatgctactatccataaagaagtaggcagtgtcctgcactccaggacaatcccagtccaatactttgtgaactgtgttgaaatggctgcactttctgtgtgctggcccccaatttcaggtaccatggctttccgttagctcagtgaatggccatcttccttggcgtgtattatggtctcattcaatgtgcactagattctcaaatgtgtagtttttcactgaagcaatttgtactgacttgttcaatcacttgggtgcatgccctttctttgacatataagtcctttcatttcatagatgacgtgttaatatagtctcctgtcaaaaacggatcaacatgtagttgcaacaaaattaaaccctcattagtggattgtttgctttgatttctgtttttccctctggttattggctcacttttccatgatggatgatgtgtgaattagagttcattattgttctttgagatgcccttttcctttgtctttttatgtcatgacagaaccagttggtcttgacttaataataccttaatttgggtaatttgaagatggcctctccaggcacacatctcatgacctgacactgtgtcaaggagattggtgtgctctaatattcccagtgactagtcctggctaggtccatggaataaagtcaggagctacaatggcctgtctccctagtagtctctctgttcagcagggcaccatttaggttctagtttcttcaggactgaattcaacagttgtcttaattaggatgtctgttgctgcaatgaatcatcatgaccaaaagcaaattagagagggaagagtttctttggcttgtgtttccagatcatagtccatcattgaagaaagccaggacacaaaaatcaagcagggcaggaacctggaggcaagagccaatgcagaggccatggaggagctctacttactggcttgctccccatggcttgcccagcctgctttcttatagaacccaggaccaccagcccagggagggcaccactcacaatgggctgggccttcccccatcaatcactaatcttatggaggtattttctcagtagagattcccatcattcagataactccagcttgttgtaaagttgacatacaattagccagcacagcaattttatgttctattatttccaattgcctctgaactatgttttcacaaggcacagagtacttacttatctgtttgcatattttggctattttgaagattttgtttttgtttctaactatatgtgaatgtgtgtgtgcctgtgtatgggtttgtgcatgtgagtgcatacttgtggaagccacctcatgtaggtgctcaggtcttctgcaagagcagtaagtgcttgtaagaggtaagctatctctctagccccattattttgttttttgagaccatgttttactatgtagcctaagcaggctttccatttgtctgcctccccagtactgagaatacaggcacttcttagaccaaagtcttctaaatctttaatgcacaactatgaaaagaaatcatttcaacctcagacaggaagaggaaggcacagagagctgtcaggttcctcttccaatggctggcttcttaggtgtggtgactgtgtgggtgttgattttattagtatgtgccatgatgggtatcttacatacatccttttgaatgtattcaatactagatgaccagtaaaaaaattttaagtgtgagacagtttatactactgaccgtaggcattttgtttatgatggccgatctgataatcttccccaaccagcaccattaaaaaacttttacattttctactaaaatactttagattgtgatttaatataggcggtgttttcttttctttgggggtactgtttataagtccttgatttttcagatgttacaaactgtcttgcagtattatagatagaacagatctaaagtaatgtgtgcaagatggaagtcaccgccatgaccaaggacaccataaatgaattaaattgtagatagaattccaggtgcattttccatgttttgaatgaagtctgagtgtggtattcgaaatattattgatgtcagttttcagattagtcctgagctaaatgggctatttaggatgacctggagatgccagcatctacactctaaacatgatgtctccagtgacaggaactcgacacagctaggaaaagttcactgtctttagcctttagtaaacgtttagaacgaatgcaatttgtaactaggtagagaaatacttgaaccagccttcacactaagcataaagtggattttcatgctagctgctgatattcattcctgggtcccactcctaggaagtagacccattttcttctgatgggatttattcctcccaccaattttactagatggttctcttgtagagcaggacatcatagatacatggccctggctagaaggtgtgagtctttgttgagaattttaaaaatcacaactctaaaacatggaacggtcacatagtggcagtgctgggaagggagtagaaggtaggctccagaggatttcttgtccctgaagaagtccgtgggggtggatcctaaggtcagcgaagctgtcccaggcattcctgttgtttgtggtcttgattcagttcaccccatcctggtgcatggcccatgatgcttcaggtgccatttctgttacacacaggctaaagaatgctgactgcctctcttggttgtttatatttggaatgtttttcagtgccctttgtcacaatagcagccatgaagcattaattggataatagggcagctgctttctgacatagctttttgaaagagtggtagtgtttatttccacctgtcataaaagcagacatgcattgacactaattaaactagtgactgtgggtgtgtgggtatatgtgtggcaatgcctctaggtgtttgctctcatacaaatgtaacatgacttttgattggaccattcaaacaaatgtacccctatcataatatgtgtgcgtaggtggatttttctgtccctcctgccagctcccaaatcatgacacagaggcttattaattatgaaagctcagccaataacttaggcttgcttctaactagctcttaaaacttaaattaacccgttctgttctctgttcatctacaaagttgccaagtgactgtcctcctgcatgtcttgctccctctccatctggcttgtggctgacgacacttcatgtctctgcccttcttctttatagtgtcctctgtacctggaaatcatgcttagctattggccattcagctttttattcaaccaataacagtgacacatcttcacagtgtacacaaagattattccacaaggtgtgtgtgtgtgtgtttgtgtctgtgtgtgtgtgtgtgtgtgtgtgtgtgtgtgtatgaaagagagaagagaatacagttgtcttgaactatgctttgattactttattattgaagacattattaaaggtatgtaaacagaggtatttgtggctataacacatacattgagagatttataagcaagaagaaatgagtgctttggcaaatggtcaaacatgtaaatgttctttactggaaggaagctagactgagttaacaccattcttcagtggcctagtatttagggaactgagatttgatgcaacacggtgttgtgtaaacttctcttcctttcaggaagtactggatttgcttccagagaagccttctgtattgttggaatgtgttgtaaaaagcagagaaacacatctgatgcttggcttcttcttggcaactggtttcaaaaactatagtagttgtttattcttgatgcatcagccaagttttcttttcaccgttaaggttgttatatgacttaggcagtgttagatcaacaacaatgactgcttagaatctgttaaggcctgagggacatatagaactctgaaatacactgcttgccccagatgcagtcttacgtggtaggagagagagtagggagctcacagagaggggaggcatggattatgaattgtctgtaccccttggggaaggaaagaagacaggagtggtcttcagggcttgggccagtgagccagttctaggagaaggaaggtttgcgtggatctggagtagggatgtaaaataacatcagaaggtcatgagacagtaagcccagtgtgggacatgggaggtgacaatgtgcccagtgctcatgtgaaagccatgaatagagcaatgggttctgtagcagtatcatttaaagactggattccataatatagaagccagctaccgattagtgtacctctggggtaatctttttgcttttgctttttcttaactatctattgagaagctttgtactttgtgttgtcattgtaggtaacaaaagcctggaaatatttaaccccttcctcttgcgagaatactgtaactatatcagtaatggtggctgtgagaaatgacttttatgtgctttgacttctgattgcagctgatggcatttaggaaggtttccttcttcctgggtggagcacctgctctgagtgtcaattgaaacagcaaccaacatattacctagtatataacatactagtatataatatgcaatcaacatcgttcacaaggcataataaatagcagtagttttctaaataaaaaagccactgcttttaaagatccatatgaacttgaacatttgagaagctgcctttaaggagactgttttccttttgatctctaaagctagtggctgagagaggaaaggtgtaagacttggtggcatgctgaactttgacatttatcatgtgatggtgctgatgtgtctggaggcccagagggaggggccttccactgaaattagcagttggacagcatccaacctcagtgactctggcacaagggaccaatgtttgaaccaagaatggcagaaatggtacaggcataaagggacgacttcctgtcacacctgttcatagtgaattgccaagagatggaggtggaacagagaggcttccagaagttagcttcaagggtttgtgagtgtagtgttacttttatggggagtatgggagagcttcatgatcaggctcccttcatgctggggattggttgctagacagaagtagaaagcctatcttgcttctgtcccctttggccatttgtttaccctttccagttcgatcttcctagtggaagagctggaagagaatctcagagagatgaagctgctgttctggtcagttactggcagagcccagactaggaaggaagggcactctaggttcatggtacagtgttctttctgctttctcctgttgcctcataggaagaacaacattttagaaaggtcccactctcattaggaaggctagagaacattttgaagaaaccttagccagtgggatgattggctctaatgcgatctggggaaacagctcagcctgtaaagcactttgctgtgtttgctgtttatcaactaggacctgagttaaaactctagaacatgtgtttaaaaagccagacaccatgcatgggttgtcaagatggctctggtaagggctcttggaggctaagcctgataaaccagagtttgatccctggaacccacttgatggaaaaagagaccgattctggttaattgtcctctgacctccacatgggtgctgtggaacaccctcccactcccaatagatagctaaataaataaataaataaataaataaataaaattagagagttgggcatggtggtgtatacttatagtcacagcatggggaagtgaagacatagatctctggggcttcagcctaattggggaattccaggccaaccttgtctgaaacaaaacaactaaaaacaagtatacctgaggaaagactcaagattttcctctgctctctaagcataaacatacatgcatgtgcttgtatgtatgcacatacagcgcgatcgcacgtgtgcgcacacacacacacacacacacacacacacacacacacacacacacacacacgggcaggggatgagaaattaaacccaggagatcggttctaaacctaagaacttttaatgtgcaacttatgaacaaaatctcttgaggtggtgagatggttcagtagataaaagtgcttcctgttcaaggcagatgaccccagtccaatccaagagagaagtgactgcttgaagctgtccctgtctcccttgacctctacacttgtgctcatgagctcattctcgagcgcagatacacacacacacacacacacacacacacacacacacacacacacacacgactaaccaataaaaataaccttccttcctgtcagaaactccatcagttctagtgatcagttcaggttttagtagaccaggaacccaggaattagttgtactgctgtttcctctaatttgtcaaatttcaactatttaaaatttcttttaaatttttaaaaatatgatgtttaagtcacagtgtctagatagaatgtttatagtttattcttgccttttttacgtgtgtttaattttgacctaaataaaatcactcctttaaagacttttctgctagtaatcctttcctttcaattacataatcataccaaatccaaggaacttaaaccacaagcctatgtttctcatgacttaaagagagtcagaccatataacaccaaacaactatttcagctctaaaattctctgtgtatttttagcataaaaaagcattcttaaaagtaaaggccaacttctcatttaaatttttttttccgttgcagtttaaggcatggaacccagcacctggtataagttaagctagaacttcctcacacagctatatccagcccctgcctcccggaaaaacagacaaaaaacaaaataaacaaacaaacaaacaaacaacaacaaaaaaaactctttaaaactatgagtcagagtctctctaaattgttcaggcaggtgtcctgcttcatttctggattaactgggattacaggtccgtgtcaccaggccctgctcagtctaagattgcctacaatagtggagttctgggttcaggacgtggcatttctgagtacctactctgtgggacggtgtgctaagtgtcttgcatatagggccacatataatctggccacctgttaggtgggcacattccaggttcattgcagatcattaaactgcagaccattgagctctcagccttctttgatggaggtctcagagtgctttgcaccgattacagcctcaactcagcaacttgtaccagcagaaacccaaggacttccattggttattataacatgctcaagcctggcttcagaaaagtttcacaaactttccaagtcgtatcgttcttaaaagcttaaactgggccgacgggtgggtgggggtggctgggaggtgggggtgggcgcgtgaaaggctgctaaactccacctaaatcaggaaagtaagttccgccttcatcaacagtgaacgcgcctattggttaggattgctcaggggctgactcacttctttagccagaacggagagccacgccctgcattccaaaaaccctgtgctgcccgaggcgcgcgggccttgcttctgcagcccctagagcttagtatcttctgtgcttgaagtgctggttaccttcccagaggccgtctgcggggacagcagccactcccctgggacgctcgcacgcacgcacgcaagcagagccccgctcaaacttgatccttcaggaactttctgggaggagaggtacgtttggctctttgtgggaaagcagttcattaaaatattctccagggttgtagccgcgccagatggtgggactccaggaaaagtcggcaaggagcaagctgcgcttgacttccacaaggtactctgtgattaccagtgggacttacttcacttaggagtcggacgaaccggcttactagatgggattcagtcctaaactaggtactgtctaggggaatcaacaaatgcggcaaactctgtgtgatgctggccgatgtggttccgagtatataatatacaaccaacatagtttcagtttggggatgtcagtgtttcctagagtaggtctttgagaggtgacgctgtgtttacagcttggctactgaattttaaggagcatgggcttcctctaaactcacctctacaaaaaaaaaaataaataaataaataaaaaataaaacctcccagccaatgttggagctggggagcgagccctctaccaggtgccaggaggaagcacgtgctgcctgggttttccagagagagtgtttactctgcaggcttctgcttctgtttagtgctgcaaggtgattgctcttgtgaaaataaccaagagtgcatgagggttgccctcccccgcctctttttcttttgctgtttgtttttacttgacttgtccccaacaggaatctgagctctgttttcgaaaaaggactgcgagcaaattttcattctacttttaacctggttgagtgagtgagtgagtgtgtgtgtgtgtgtgtgtgtgtgtgtgtgtgtgtgtgtgtgttttgctggggatacagcccaaggtctccctcatgctgcatctcttaattctttgtcatgtggttttacacttatgtaggaatgaacttggtaagcttttaaaaaaatctgtttgcccagcagatttatttattttgtacaagtcggttattttattttatctcttggtggtggccgttgaatccagggcctctcatggagacagacttctaggggttacttactgtcctgctatagcttgaggaggtagaggcctgggaaatcgcttttgatttctaagggaatacacagtacaacagagagatgctatcggaagtggagtcagcatgtaccagaaaggcgggcacttgttgttctgatggcataggcaataacagagacattttaaaactcatctgtggttacaactgtgaacttagctagggacattatccctgcacttctgcatttatgaagctataggctgacacttttcagtagatggagagagagcagagtaaaattctttgcaactgacctttcttaggtccaaaaaggaaacttctctagaaagaaatcacttctaaatggagtaattaaattacctgttggtaattggagaggctagttaccccttccgagcctctgagcgtccagcaccctttgcaggctcctgggctaattgttaagccagctgcagtgcctggtgaaaggtaacagcttggaaagcttggataacaacctctgatgtccagaggaaagtagctataagatgggcagttagaagaccccctcaggtggtgagagaaaggggcaaacagcctgttaactcttaaatgtctaaaatctaaaggcatagctaaatgtgggtggttcacctagcagttgttacaaagctgaacacttgagggtgtccttctgtttgccactgagatgctgtgcatccactttctcctcaccccccattttcatagtaagaggggagtgcattactcctgccttgtagttaaagacttggcatagcctgttttgcatttcgaagtcagtggctttgttagttagaagttagcattggacatttgttattttcccctgtggctctaatagctctcaaacagtgcccgttttctttatgtgaaacctctctctgaggagagccttggtttgaaacagatttccaagtgattttaaaggtcctcggtgccccgtgtccgagtctcaaagttcacggcttaatgtatttactcaggaagcctggggttttcaaatattaactgagcaagccctacactcttgatgggtgggttgataacacgtggctgcctcagggcaatcaatctttgttgactttcccctatgcatccttccttctcctcagaaagagcacgctggctttctccaagtgtgatgccaagagcaggatcctatgccttaagcgggcgactgtacacacaggctgtgtttgatgtgctgtgtggaaatagttttcaagttaagttggcaattagtgttaaactcgacttttcaaaatggtgagatgggggctctacagagagatggctcagtggctgagagcacgcacctcagttcagttcccagcacccattgccaggcagctcacaactacctgtaactctagtcctagccccagggagatctggtgcccctagcctctttggacacctgcatgtatgcctcctatttacatagttaaaaaataataaaaatgaactttcaaaaagaacaacgaggtaaaggacatgggtgggagtggataaaatttaacttgctggaaggtgggaaaggtacagtgtgtctcaccagtggtgaccatctgctagcataccacgatgcaagaagacaatgccgccttcttggaagaccatgagacacctactctagtttaccccacccttcacccccatcagtccatcttacttggaactcccactcacctttcaagccaagaatgtcttggccacctcctcagatctctgcatcctagctgttctaagtgatatgcatgtttgaggatgttgaaagagcaaaggagggcttaggggtgtagctcaatgacagagcatttgcaaagtacccaggaggccctgggttcacttcctggtctgcaaaaatgaattaaaagaacaagcaacagagtatgccagtgtgatggtctaaccacttgggagtattctttattttagaaaacctgaaggaaaagaagtttgctagaaattagattttcaaaagcaggtggatggtcatttctaaagcctttggatttagagtgtgttctgttgtcaaacagaattgcaaaatatatttttgtaaagatggctgaggatcacataagaagcaagcgatgagggctgggagtggcattacatacctgtagtattactccccattggaaacagaggcaagaggatctggagttgaaggccagtttgggttacattgtgtgaccctcagtatcttagtatctggcatatgcttgctaaagatcacttgtgtttattaacctcacttcttttttaatggaggcatcaggcaggaatttcaggatattggcgttatgtatgacatgtcagcttcaatacaagatttaatgtgttctgtgtgttttgtatctgagaaggaatatagattcataagcttgtcttaataaccaaagaaggctgatcaggagaacagtggtgtcagacttaagcagtcttgagcaacaagccttgataaacctggagatctcggatcaccaggtgaagtccccagaagatttaattcccacacttcttgcattgactacagataataacaaagaatggggactctcaagacaggtcttgggtgacttattggaactccttgggccttcatttccttagtcacaaaatagaaatagatggatacttggtagttggatttttctttgggccaccagctcataaataatgacatgaaaacttattattcatttgaaagtttgacctttaggcttgtcccactaactcttatagcttaagttaacctgcttttattaatctatgttttaccttgtggctttttcctgcctttcattctgtatgtccaactccttctgtgtctcgatgttgtctcctctgcaccttgattatctctccccctcccttcccctctctgcctggaagcccctcctatacctcctgcctagctattggccagttggctctttattaaaccagtcacagcagtatgtcttcacacagtgtacaaacatcccacaacaatacttacctcacagatggttgaagacattgaaggattgatgtagctaattcatgagaggtgctcctgaggaatagtaaacatcatgctttacccgtagtggttgttgttgctgaggagtttttctgctttcatggaactgcttgaggcaggtgattgtgtctactgggtttgtatttaaatcctcttcctgagcatgcagggcagttttggagagggtctgtaatcacttgagccatggttggaagacactgggtgtgttcactgtagagaagctggcatgttacttgtttaatagaaagatgtagctgaccccagattctgtgtgagccctctggtgtaacatgtgctttcccacgagaagctatagctttgtttgaagagaaatatgcactgagctaggctgtaggagagctagtttctgctagttcctgaatttactacaagttttccatgtgccattgtgtcaactgactctgtggttctcctcagaaaccagttttcccctctagaggacataaggtaatgtctggacgtagattttattgtcatgactggggaagggtggagccaggcatgctgctgtccatcttacagatgctggatggtcccatgacaaggacataccccgtccaaactgtcagtagtacaggattgagaaatcctggcttaacagttgagtgcttgctgtgtttgtgaaattgaaatagctgtttttacttgggtagtattgacagctacctggaagaatatgcttatgagagagcctttgagacttaatatgttctaaaatcttcaggtgtctgtaagttttgtttttgtttctaatcattggtagtatgatacaatagcatttgcatcattctccagaggaatatatggtggtagattggcgataaggtaaacctatacttggacctctgctctccagtgtacctactatgtgatttgagtaaccacatgacacagtccatactcgtctgtcttgaaatcttctctgacagcgccattagtctaaaactcttccatttagcctccggcaaaattttaagacaaggacaaaaagcagccacattctttgccaaaatatcacaaaaagtctaggccgtttactaatattcttctctgaaaccttcatagctgtactgtcataatcgacatttctctcagcaccattgttgtccatgttcctattagaatggcccattaagcccacccacccccagtacccccttcccccagcttaaggctttcaactgtcctctggtctgaagtccacattgtaccctgctcctggtaccatcttctgtcttgattactgttctgtgtctgtgatgagacaccatgaccaaggcaactcttagaaggtatttaattggaagcttccttatagtttcagtgacttagtccattttcatcatgtcagagaacattgtggcacacaggagtggtatggaaaagtagttgagagttacatccagatccacagactgagagagaggcactgggcttggcatgggcttatgaaacctcaaagcccaccccagtgacatgctttcaaatcatttcaaatagtgccacttcctagtgactaagcattcagtattaaccttatgaagggcattcttattcagactaccacacagtattatatgataaccttttttggttgttgtttttatgaagagcataatggagttgggtggtagttactaaaaacatggtatttggcaagagcatagagaaggaatttggctttttaaaaaagttcccagatgacaagcaaggaattcttgtctttactgcagaagggcataaacttttaaaaacaattttatgtatatgggtgttttgcctgcatgtatgtctatgtgccatgtgtacacagtcctgtggaagtcagaagagggtggcagagcccttggaagtagttatagatggttgtgagctgccatgtgggtgctgagaataggactctggtcctttgcaaagtagcaagtgctctcaaccactgagccagctctccagtctcagaaggagagatcatttttaagggaggcgaatgttttgtgagctgtagttttgatctcacagggaagcaccaggataaatgctaaaggaagaagtgctcaggggaaggaagatgtgcttattgggggggggggtattgttcatggtgggtgctgtgaggaaaacaaaagtcatttactttattaagtcttgaactcaccaagaagtgagtttgtttgtttgggaattgctctgctataaaagctaccagtgtttgtgggtaaggggtgtaattctgtgtttttcttactttaaatatggtttcttaatgtatttcctggtaagctgtaagcagcacacccgccagggtaggtgcaaaggccttgtcatcgtaggatggaggtatcatgtgaccacttttcttggccccttctctttgtatcaggccccacagtcgttctgtagcagcatgcagctcacccacaagaacatttaacacatgtattttttttttttttttacttaagagtatgatttttgtgtgatacagcgcagatgagagattctagtgttcagtccacttgctgtctacatgtagaggaggaatgttttgcagtttgttgattttcccagtgctgaaggattttgtattattggagggtgctctattaactgtgttgatgttgttccctagaaggtctcttcctttgaagtaaattgtgtaaccttcacctaaggacagggcttgagcctgtaaaggtggccagtgtgagcacctcccctcccagcagcaggggcagacttcacagctcatcctccctatgaatagtgacaaggtaggatcacagcagccttggagtgagtggcatgcataatggaatggattgggcttgagagcacacagctgagaaattgactacatagactaagatttggaacccttggctgagttaacctgcaggctcacctgattctcctgattggaaagaaataggaggcgatgctctgcctctaatggcctcatgatgcctggaagttgctgggtaatcagtgctgacaaaacaaacaaaaaacacaacacacacatacacacacacacacacaccctagctaaccaaccaaacaacaacaacaaaaccttactctcagagaatacttcttgcagtaccctaagccaagagtttagtgagtctagtctggatctctcaagaggataactttgaatttggagatatctctgctgaaaaaccaccagagtctatggttaagcagtgtgaaatcgtttttgttttgttttgttttgttttgtttttcttctaagtactaaactaaaagactggggaaattataattttagatggcaccaacgattgtgctttttgagacttgataggtattgggtgtcttcttcatgctagacacattccttcgctttgtttacttgggttgggatgggaattgccacatgctgcaagtgtttgcatgctgtgtacatgcatgcaaaggcctgggcaccaacatctgcagcgtttgctgtcaaatccccaagttctagattgtctagcttcaaagtataaaggtagatttctttgcaattttagggaggctgtcacctagaggccaaacatattctagacatggaaggggtaaaaccatttaaaacaaatggaacaatgtggaacaaaatggtctcaccacttacgttgtaggacatggtgcattttagagtttaatcatgagagctcgtgttgtttaaatacaggtgtgagcttgcattcctgtttcccataaatcagctcttggaaactcctggccggaagcttccttttcctggaacatgattggctcctaccacacgttggtatatgtatcccatattagagccaataggcagatcacttacccccttccaaccttggggaaaagctcactctgaaagaaactgaagtcagcctgtaatgagtgggtcatggagaagctgtagagaggaagcagaggtccagtggtctgccaggtagccctgtgacctgcctcacttggctctgaggggaccttttaacagaaattgacagagctagaacgtggaggctgaggtagaagaccaagttcagatttttttttcttatcttatgtgtatgaatgtttatctgtatgtaagtctgtctaccacatgtgtgcagtgcccaagggtaccagtagaggagtcagctcccctggaactggagttagggatgtttgtgagctgctctgtgggtgctgataaccaaaacttggtcctctggaagagcacatagtgctcttaactgctgaactctttctcccagcccaggaagacaattttgagaggtcagtctggccagtacatagagaaatgaccctgccttggagcagcactagctggtctctgtctggccacctgacctatggtgggcttgtctgtgtgctttggagtacagattgccttggtagaaagcctgataatggagtatgggcttgctgccatccctcaacaccgtagagtgtgtcttcacacaaagggcaccatgtctagccatgcagggagactcaagcacaaattgctgacccacgacaactgtgcatccttaatgcttggaatttgttgtcctcaccagtcagaaggttaccatcgagacctacgttgtagtttgtttctcacgataggacattcaattggcattttgacttcaatgctactttgaatgtgtttaacacaaaagttttgggccccgccatgagctgtggtgaaaccaagcagattcttcaccagggttactcagctaccccaggagtacctctcctgactgattgtccatacaggagtgtgatgggcatcctaatactgttacctaatactgttatagcttagaagtattggagaaaactgagtagcattacatgcctattcgcacaggaaacgtagggctccatactgtgagtgactcatgcatgagtaaagaaaatgagttgactgctgtagttgcaattacaaggcttgtgagcaggccctgtcacttctcatttctattgtacaaactaccaaatagctacagaaatccttgatcaaagcagtcatgactaaaaattttagtgtggttttgtgttgctaagcattcttagaagtttatgaaatatgctttttttttttttttggatccaatatcttgagtgttttagttctcagagctgtggctcctttaaagttcttgtaaatcctaagtccccactactgtactcaaatggtctcctccagttaacttctcttcattgtgattttgtgtgttgtttattggttttgtttgtttgggttttttggggtttttttttggctttttttttttttttctttttttggctttttgtttttgagacagggtcattcttactacagatactaggctggcctgggaagctcagtgtaatccagagtgtctttgaactcatggcaatcctcctgcctctcaagtgcagggattacatatgtgagtcgagggctttgtgaatgactcttccagatggttgatcagctagataatcttcagcccaagggcccgagagaggcacttcctgttagcatttgctctgaggtcacttctcagctgacctaggaattggaagcatttactttatgtccatgtgaaagtcagagataggcagttaagtgtttcttaaaggagaaccctcaaagagaatgcccttcgtaacttgagcaggactgcgactcacagagattgccttgtgaaaatcgtgtagatctggaaggctctaagggaaaagagccagggtggactggggtgtctgcacagggcataggcctggaatgattccccctggattgaagacgaagaaaacataacaagcattcaattgtcacctctttcctgagagtgtctacccttactaggtttggattctcacagttccctgccatttccatcgttcccagattgtcactgtgcccagactcagcctcgtaagaacttaacaaggtcatctgactaagttgcatatagggcaggaacatgctgttgttagctagcactgttccatccccggtataaataagggagtctatgaaatttcagagtgaagttttctctgtgtagctaaaccattatgggaagaagattcaaccaagcgtttagcctttgaagaactcggatattcccatggtttaaatattgaatggaccttgtagatatatgtaaacagaacccaaatgaatgtagccaatataggaagcagccaccacaccagggactcaaagggagtgcccaaagggagagagaaccccccctccccccccacacacagctcagctctagattttgatccatacctcactggagaggatgtggccctggcacactacactgctaagaaagtaatagggtgccttgctagtagaacttgctaccaacctgccttccagatcttgctgaaaatttttccttagaagggccaaggatagctgttcagagggaaatgtcacccagggggcatcttgctccatcactgttggagacagtctgctgtgtgagggccccggagacaccaagtgtagctccatgctccacaatttctccagtgctgtgtactcaaactcaaactgacactatgccagcctacaagtgaaaaagacacacgcaggtcctaggtttgccacttatgtcagccaactactaaagggtgagtttgtgtctgagaggcagtagctcaacaactgatggggagaaaaaagaaatcccatctcagggtttcggattttcttttgttcttcctggcatttgttttcacactttcttcctcctcttagtttattcctggcctgtcccggtagtgactcaataaatactaagggctgatagaagattagattttttttttttttttcttgtttgcctcctaagccatgggaggcatttggagcaacttttatcaagtgtcacatggcctgatgacatttcacatgtcttgcttaatgcctgtgaaggagaagagcaccactgaagctacagtggcctgtgaaaccattccgggatcttagctctgagaagggtttgacaatccattccctagttctgattttattcagacgaggtaggtgttctgtgcttttttctctgtgagttgagatggtattccttctaggagagcttggaaagacccctcttcccccccaactttgctctgctagttttctttgtggtctcctgcttcataacggtgcagtgtgtaagtcaacattctgtttgaaacagtagatatactcaggcctaaccttgattcggagtttatgtatctcctgcaagacttttgtttttctctacgtctggtcccccgtcttaatgcccctaaagaacattatactcattggatggatttgggagagattcagactttaagactgattaaaatttttttccttatattttaaactagattttattggataaaaatatcaaacagagtagatagttacttataatcttacatcctggtaaccatgataacataaaaaataagagcaaaacatacttgtggtttgtattgaaacttatcagaagctatagatgagatgtgttggttgccatcaaatatgttggtgtacttgtgatttttttttcccaccagaaacaaagtatttgtagcatatcaccatttgctcttaataaaaaatgttaaatttttataattctgcagctaaattttctgtacttacagtattttggagatcttgtgtaaccacacatagaaattatggcttttggttgcagtgattgtatggtattttattaaataatatacaataattaatttcacctttgcctctttctagacattttacattgacttacatgagcacattttaagcatgaaaaattagtattacttaatatacattatgtgcattttgcctttctttgggcttttttattaaaaccattgtttttactttaatggaagaaatgttaaatattcttttaaaaaataaaataaataaaataaaagaatgatgctggttgagaaaacttgaccatacttttttgctgtttggggggctgaatagttacagttcaaggctatagggggtatctacactgatcctagtcaatcctacattcataaagacccatttacctagactatttataagaagtattcatcattgatgcccttcccctctgttgcgttggcccctatcagtttattggcactctgggcaggtaagcttccaatgtcattaacctcagaatatagtatctggtgagatcatcttgtgcaatcagaaattgtaggtaattctctcttctgtgttttgagcccgtagatttgttttgtacctggttcatgaagcatggtatattgagtgaactcagaagcacaggaggtgagaaaaagtgagtgaaactagaaagcttggttagagattcatttgagggcatttcaagccaactggatggatctcacaaatccacccctagaatgtgcagcaactccctttcctgctgtcttaactcccagtcagttagtgtctagacatctggggtgggctcccaggtaatgatagctcatttatctcacacatgtagaaactgaatacaagttcactgtgttcagtgttgactgaacgcttctctccttgttcacacaattactctccagactgctagtgagataatcatgtctgttctcttatgagtagtgttagaaaaggtaccccacagtaagaccaaaaaaaaaaaaaatgactagtggatttctctccagatttcttcaatgaacaaacttaaaaggagtctaattaatgaaaattgaatatacagtgtgttgttgcaatttatgtgaaccaagcttcaatctaaatcccaaaatagtaggttagttttttattacttacacatctcctgagcagaattttaaatatttttttgacagttcaaagtctctatttatagccataccatgatacagtacttatttggtttggcacattgtattttcttaaatgttaataagctaatttctggtagagttaggaccttcttttctttctgtttgacctgtgatgagctaatacctttgtttaatcttcacagttttcagaagacagtcgactgaattaatttgtatttacaaaacaaaagcccacaatctgaaaaatagattgaattttctgaaagctgatcctattaggctttgacttctgttactgttcagtgacatcacacagaagaaaaaaggatactagaacattagagaatagccataattactcaaaatgatcatggtgtttgttaagcaaacatctcagagcagaccgagtagatcatggatgaataatgtcatttactaggcttttgaccagacaattttgctgtgttttggtgatggcagttttcttttcttaactatattgatgtgaaagataaatggaggtactgacaccgtgtttcggacaaaggaaggctcacatatgacttctccagtgcaatagttttgtgccactgtgagccgagtcgtatcttcagcttttaacttattaatcaagttgactaaataaggctgatggaaattcacttgtgtatttgtctttgacattttgtacaaaaggataaatgaatatggcagtagaatctacttagaaaaatgagttcctggaaataaagagtttctgtgatttgttatactaagacggtctgtgggtggacaacgttctttgtggtaaaccagttgtccctggagaaatggggcaaatgaaaacaattctgatatcaattgtagtcaatgtaaaatgtgtaaattaacaggagcttttgtgaggcatgtctggttatcactgagaataatcatgctgtaaatgtgtcattcatttctttacaggtttgttggggggaggtggctcagtgggttaggtgcttggtaagcaatcatgaggacctgagtttatgaccatagtactattgaaaagccaggtccacctatcacctagcatttggaggtgggggtagaaggaccttgggaatttggagaccatcgagtcaagtcaaaatgatgagcttcaggttcagtgaagagacactgtctgaaaagtaaggtgaagaagtgacctcaggcttcacacacacacacacacacacacacacacacacaaacacaaataagacaaaatggtttctcatgttatgcaaattaagagggaagactttccaccttgtaagagtttaaagtgcctcttacaataccaggtaggagaaaggagccagtttcgagtgggttgtcattcagtgaaatagaaacttcctttgtgttaccagaacatgaccattaagacaattttctcccattgctgtcccaaatgttagataattgatcctggtatatgttatgtgtttctaggtgagactagaagtcccattgaggtcaattattaggtgtaagtgtttataacttggcatttgtatttcaggagtccacacaccattggtcaggtaaaacatgttaattattgtcatcatgaggcagcacagttgctgggcagcagcatcaggagttggtcacaatgcattgagctgtgcctccagggagcttcctgcccaggcaccctctggccttggtgtgacccatagggagtttgattacatcaatgttggccgtaaggcagaaactgagggcatctgttatttcccagcatattctgctccacactgatactgaatgaacttgtgttacactaagccattgtctgtagttttatgtttaatttttgcctcataaaattaactttttcgtgtctcattttcactgataagacattggaattcatgttatgttctgtactaggtgtcttttgtatttgtgctttttctttatgacctaggtgctcttagcctccactagtaaaggttactagagttcagagtggttgagcaattcatttcagatcttaaagaaagtaaatagaagagccaaactgaagtctaggccacctggttccagaatttcatggcctctgtacttaaccaccctcttccacaggagagtatagacggctgtagacatgaaaaccatgtaaggaactctgcaattaccatgcagtgatagaagtttcttagcaatgtgatgtccacattccttccttgaactttgacagacaatcctcacctcaatctgtgtctacttcaaaggtctagtcataatgaataatttgatacctatctttccaaatatatatgcgattgtataattacataatgatcatgtgtatacacttctcatgtatcctattgaatagtcattgtttgagcaggcatcttgtatttgctagcatctccagaacgtatttctctgtgtgtttttgtgtgtcactggggggtcatattgtctcatggattacttcacatggaccttttacaaagtggcaaaatttcttttaatatgtcacttcccttggtttattttgtgaaagtacgagttaaatcctctcttttgaaattcagattattagaaagtacaaagatgaataaatttacctctccctggcccccgctttttcctcctttcccctccttttctttgagaactgtataggagccggctttataagcaacatactacctaaacagcaagaacttgctagaatgtggccctatgaaaaatagtgctaaaactgtcttggaaacaacctaaacctgttgctgatgaagtatttgcttcaaactgcttagaaaagttgcacaacccatttatattcaactctgttgtattgcaaatgaacacattaaagaagggcttacttcatgtatatgagtgtatgcctgcatcgatgggtgtgcatgcaccacatgggtatttggtgcccatggcgtccagaagaggatgtgtaacctcttggagctggagattcatgtgtttgtggactgttaacgtgggtgctgagaataaaacctgggttctctctctagccccttacaactttttagttattacttttagattaaaggttaataaatgtgtgtttacataagcaaaaataatctcattttcattgtctcatgtttccatgtctggaggcacctggcttcccggtcatctggcagtgctgcgagcatttggatgtaactctgcttgggcaactctgattttccatggtctgctttgggatttctcttaacagtgtatatatatttatttttaattgccactctaagtgaatagttgctactttcccaagacctctgcttttgaagaagttaagggggaatagaaaaataatcaaacaagcccctttgcctcttttattactgagagaaaacaaacaaaaagacaaacccaaatcaatggatgcatacattctgagctcccaggagcatgccagggaaggggaagagaccttcagtagtgaaggctttgacctatgtccctttctgtagcccctttgagactgctgttttggaagccactagggggtggggagagacaactactttaacatacatttgttgttgttgtttttgttttgtagctgtgtgtgtgtgtgtgtgtgtgtgtgtgtgtgtgtgtgtgtgttttgcttacatgtacgtctgtacaacatgtgtacagtgcctgtgggggccatcaaagggcactgggtttccagaactggggttgcagatgttgtgagcctccttgtgggtgctgggactagaagccaggtcctctagaaaagcagacagcgctcttaaccactgaaccgtctctccagacctcttaagctaattttattcactttaaaaagagaatcctgggatatagaaaggaactaaaggaagaaaaacatgaaaaagagaaccctttggagagcgggctccattgcacatgagttgttggtatggtggtttgaataagaatggtccccataggctcacagacttgaatgcttgatcaccagggagtggcactatttaataggattaggaggtgtggctttcttggaggaaatgtgtcagagaagatgggctttgacatttcagaagcccaagccaggcctggtgtctctccctctctctctcttactgcctgcatttctggatgtagaactctcagctccttctccagcaccagtctgcctgcacgatcatgtttctgccatgctgattgataatggactaaacctctgaaactgtaagcaagcctcaattaaatgctttcttttttaagagttgttgtagtcctggtgtctcttttcagcagcagaacagtgactaggacagttggctaatacacatagtagtggttttctgagtaccagccatgaccgggtcagacttcgtgccttgcagtctgtagaatctcgcggtaggtatgccagtacctgtagttttggagccaaagaaaaatactcagaaaggtatattagtttaccagagtcacagtgagatttgagtgtagttctttctgcttcatagttcatttttctaaagactaccttgttcattactttgcctagccccacagtatcgccgtttccacagacctgaggatttattctttgcttcatatattcttgacctgtaaccgcttcaggtgctgcacacagggcttctgctggaccggcatcctggccagagaatcgggtgggggtgccagtcagtgtgctctagtcagctggtatagctgccaagccccagacttcaaaagagaggggattgggtgaggacgagagggtgacagaagtggagtgtaagtgtgggccaccaggagtgggaccctgggtcctatccaaagggacttttgtgacatgcaggctgctaaggagatggccagtgagggaatggtgagacttcactagaggcaaagtttgttgtttttgatgttgtttgatgaaaaaatgggggcgtggggtgggagttgtggggggcagtgatggctcagcagttaagaatacttgtttttgtagagtacccaggttaagttcccaatacattgggtgactcacagccacttgttcattggatctgacttcatgtcatcttcataggcccctgcattcccatggtgctcatatattgcacttgagaaccagccccccccacacacacacaaataagataatctttttaaagaagaaggacagaaaatgcactgggaaagaaactagacattggcttcgttcatctctgcagtgtacagttgaatgatcaatcagttaagactaaaaaaatcaaatttacctaccacaaactatactgaggggaataatcaaggtccgctgtatcattttattcattcattatttatttacttacttaattgggggaagggaatacatgtataacaacttacaggagttggttctctctttccattgtgtgggccatggggattcaactcaggtcatcaggccttaaagtaagtacctttacccacggagccaatcactggctcaaatgatacaaaaataaataatttttaaaattgaataaaccctttggcttttcccaaccccatacatagtgtcgtggaactttagctgaactctgatttgtgacttttactgtcatcctagagccagaccctaatgtctcactgacagcatcctgcccttaattctttaaagtgttgccggagcagcaaagccttcataagcagcctgggactaagttcttggaggtttttaagcacttttcccttttctaatattgaagttgtctcagatacgagtttgatagcattcttctgtcactgactacccttatcaaggcccactaaagcgttcagtttaattttatagtattaacagctgacttttctcatcatccttgcatttcattagttaataacttaattaaatcctataatagcagaaacaagtccaacctgtgtgaacaggtttggaacctaatacaactgtcttggtaaacattgctcaactatgtgggaatggcatggcaggcttaaatcagctaataccaatgacggtgagtagtgctttagtcatctgtgtgttttcccctatgttacagagggaggagttcatccagtctgaggattaaatagaggctgaagaattagaagagcttgggctgtggtggtttattgcctgctccttaactgctcagaggagttacttattagaagtatctcagagactccaaaaaatctactagattttagtcctcatttgtatattagaatgtgaatgcaaagggaactgtcctggctggttttatgtcaacttgattgaagttaagagtcatctgaaaggagggaaccccaattgagaaaatgcctccataagatcctgctgtaaggcatttttttttaaattagtgattgatgtgggagggcccatgccactgtggaatgtggtatctctgggttggtggtcctgtgttctacaagcgagtagggcgagcagccatggggaagacatcagtaagcagcacccctgaatggcccctgcatcagctcctcttgccaggttcccaccctgacttccttcaatgatggaagtgtaagccgtgtaaatcctttcctctccaacttgcttttggtcataatgcttccttgccgcaagagaaaccctaagatagaaatttgtactagcataatgggatactgctgtgacagacctgaccatgttttggggaggattgtggaaggactttgaaactttgggctagaaaaaccattgagttgagggctcagtgggatgttctgtaggagcttggaagaaaagtctgagcagtacagaagatggaggcctgccttaggagggaaacagtctctggggccttatgtgccaagactctgtggtgtctgggcagctgcagctgaagaatcagctgtgctaataagataccggaacctaaaataaatccttatctttgccagggaaggtactaatggttacactaacccattgattggtctgttttctggtactgtaatgaaatacctagggcaagctcttttgtaacaaagtgtttatttacctcccagttttgaaggctggaaatcaagatggggctaccctatcagtttggtgcctgctgaggggcctcttggtgagtgccttcaggaagaggaacctgtgcaaactgaagagttcccatggaccgacaagaagctacccggtgttagtgtgggtttcccttaaaaaaactcaagtctgtggaagactcaccttggatcttgctagaaccacgtaaatccttttccagcatagtcccctcagtagctcaaggacacccctgtatgttataccccttaaaggtccatatcccctcccacatcacactagggaccaagctcccaacacataaacccttgtgcggcagattagtgtagtgccatgaaagtgtttttatctgggggggagggtgagggctccaatcatagagtttatagcagagagagcaggtggaaaaattttctcctcatctccgtgtttgtgacctctggacactgggctaagtgtgttatgagtgtgctaactcacgtgcctccagacagcttacactaaactcttcctagtagatgaaagctacaagtagcctgtgcagattaattagaagatagagttcctgatttactggctggtaataggacatattttgagacaattacagtcactgaacatcaatattttaagtttttcattaggcattcctagcagattggttgttaaaaatttgatgctgacaaggcaaagaattatgtagagtgtatcctaaaagatgggttaaaaacaaaaggaataagtaactgtatgaaaaagcatgcttatcttcctaatgcacatttatttactttacctaacctcagatttatttagtttggtttccattttatgatatctggctccagaatttgtacaaacctgtttaaagaacacaaaggcacaacctttgggaaaaccagccatatggatagctatgaataattgaacttccagttgggtgtggttgggcttagtcatgttgaatctccagttgggtgtgattggccttgttgtgtgtcataaaacatggtacagaatgcacatgtagttttagcctggagccattatttctgccatgacacgcattgccatcctagtatccgagtctcctagagtaggaatccatggggctgctgatggaggggctacctagttttaggctcaggctcttgaggtgtcaacactgggtctttaggtacaatctgttgactagttttggcaccccatttgatgaagggatctcaagcaaaatgaaaaacctcacaagatgcatcttatctaggagaagggaactgatcagtattcaagcaaaacaaaactcttcctcttcaaaactcgagaagaaagatgtcagaagggattggaaactattttctccttcagcagagtgctgggtcccatgcagttttccttgtatctgtagagtgggatgtctctccagatatttgagtaatgaggaccttgctccaggcagaggcactgagcagtgtcccatataaaatcaaaggagtcctcatttgggggattggacctttagcatttcacctgaaagtctaagatgccctgcccactcagccaaagctgttgctagctgaatctggattgcctgtgccaacataaagatactatttaaaaagttattttaaatctctctccttcccccccacccctccctctctgtgtgtttatatacagtgcttctgagtgtaggcatttacatgcaatgatagacaacttgaaagacagttttccttttcctttttttgtttgttttgtttttgctttttgtttcttgagacaaagagctgcctgcatcagcctcctaggtgcagatagtaaaaggcttacaccacaaccacccatccaggtctctccttttatcatgtgggtcatgggattaaactcaagttgtcagcttggtagcaagtgcctttatcctctgagccattttgccagccctctcatattatagttcactgaaataatcttttgaggttttgaggggtgggtgtcagaacaggacccacacacagccttttgatcaccctgctggttagtctcagaattctgggcctttatcaaacctgttgatcaactgggtaacaggtcagtgacttaatgaaatggaatttctaaaaatactattttcttcctggcctgcttccttatctgtcagtgtgatgttgctcagatgtttcctggccggcctggctgcctctggagctagacaagaaatgaggggtgagaaaatggaaattggctaagaaaataccaattaaggatttgatgtgccatacttgtgccttgtggctttatattttcggcatgacacaggcaccttgcacattgagtttggtctttttacctttcttttttcttttcactatttcctgactttttttttttttttttcagtttgagggaacagatgtaggtgagagttggtctggccaacactgactggggtgatgtgtgggctcacttccagaatcgggacttgctttgaccaaagattgttgtgtgaatttcatgagttatggacaaggaacagctcccatgggtcaaatgccctaagtttggttgaagaactttggcttcctgtgacaagagttggtttgattagtggcactagatttcaccgacttgtctgcattcctgtcattagtcacctctagttcctgtgtctcattttcctcttaaaaatttccagtacgtaattctcatgtgtgtatattattttaaaccaaatgagtatatgacagataaaattccaatattccagtttaaaatccttcttatggagtcacttaatgctcttacggtatagtagggaaccagtagattaggaaagggtggagataattaaatgatgacaatttagatatagaacagtaaaataaatctgataactatcatttagtattgttatcagtgttctgtgattccagctctctctcctattcatcacccttcagtctggagaaggagacagtatttcaaagcagatcttagacagcatgtcatttcaccctcgtactttactcctgtgtttgctgttcaattgtttactttttttctgttgactttccttttctttgattctgaaatgacacttgaactgtgctctggttatgttatggaagtatgccctctgccattcttaccctgcggttagtccctgaggagctagtctcctgaggaagaccactcctagagtagcactcacctctccttccttggagaacttcgaggaatgcctgctacctcccccgcttatggtgttaggtgggaagcaggtgcctgttgcatggtgctgttttagaaataggctcacctctgtgtcatgatgacttgtatcattttttttaagctcataaaggagtagacaatgaacctctgaaccagtggttctccacccccctgtagcacagattctacctggtcttaataatagaaattcagagtcagctctcggggtgaaagctgaaggaagtccgttgttgtgctttagttctctgtcccctgcctagaaattgatcccgggaattgctttgtgttgtttgggaagtacttggaaattgaaatgtgctctttactcagtattttatgcctgttgtatttgatattagggaaatttgcaccaccactgccaagggtctggagatgctaagggaagcacagcccctcgtttggaacagtttgatgccatcactgactctcccatgtcactggtttctaccactctctctagctaccccaaaggcagactaggatcacattcagggccctttgccttggtgtgctcattattgttgtaacacagttgaatttgagcctaaattcctgaaatttttcctgagaactggagacaattttatttagaaggatagttttgagattcctttacccttggatatcttattgctaattttgtgattgctttcaaagtgagtaattctaaagcagattaaaagcaccactgaagaatacaactgaagatgcttgtgtgctgtgtgctgtgtgtgtgctgaacttgaagggctacaacagtaatgatcacagcaaggcgaaaggctcgaaatgttgtcatagtctgcctctgggggcgcgggggggggggttgcagagagtggtaggaaaaagctgtctgtgacagagagccgaggttcagcttctgcctcatgtgctagaaacccagcatgaatgccttcacacttgcaagctcttattatccagctgtttgtccaaagaaacacctggcataagctgtgagatgttatgttggtcctttgcagctccattccactcatgtggaccctactcactggtgtcagtcacttaagcaagagtgtcatggtggctgggacatgggggatgtgaggaagagaaaagagaggagaccatggataatatctccccaaggacccactctagtgacctactgccttcagttaggcactacttgtgaactttctggactgccaccccgccccccacataccccaatggcaaatcttgagcccatgcagaaggttctagagtcaaaccactccaacattcctttattctggctcaagtgtaaaaataataagtcacttaaaagtaatagtaatgcttgatgtcacaggacagcattagatgctagtcattggcagctttacatgtatacatttagtcctcttgtgagtcacaggaagaggacatgacaaaacagttttcatgtggttggaggcagagattggtagaaatgtcattggatccaaggctacctaattccaaaatgttcatcccattcctaattttccataaccaaatgtacagaaataactcttccagttaaaaagttcaacatggggtcaagattagcagcacaaaacagtaaacgggcagtaggccagcatgcgttgtttgggatgataactgagaaggacacatttcacttctgggtctgctagcccaagtgcatgaccccagttgaattgggagaaaactcgaggaatcaacagaaattctacaaaatactgtgggatttttgtttgtttggttggttggttggttggtttggtttgttttttgggacaaggtttctctgtgtagctttggagcctatccagcactcactggatagaccaggctggcctcgaactcacagagatcctcctgcctctgcctaaaatactgtttttaagacctgcccaggtcattggagagtgagatgcaaaattaaagtaagatgccaaattagctgttcagggtgggcagttgggtggggggatgacttagaggagctagtgaaattgagagaagaacatgggttgtatgactgagactatgatgttttatgagacacaacctggctttagttgttgtgtcatgattctcctcagttgacacaaagctggtgaaggataaacctcagtttcctgtactattcttgcaactttaagaacctcgtattacttcacaatgacagggaaacgtgatggaaagctgtgggggtggggagcaccatgttatttactgttgtttttgaataaggtaaccgaagtctcaactgtgagactcctttacctgagattctacaaaatggtagtcactggggaaggaagaatttttagccaaatattggcaaaatacaaaaggccgtgtcccagtccacccctgtggctgtaagaacaccataaacaacagaaatgtctgacaatcctttgggtaggaaagaagttgaagggcagcttagtcttccatctggggctattagctatatatttcatggtagaagggacaagggaatctttggtctcttttttttatgaggacattgagtctcatcagtgagggctctatcatgagaacatgatcagctcccaaaagccccacctccttacatgttcacctcaagatgtaactggaaaggagatttcagtagtcatatgtcaggcatgttgaaaactatgcttttaaggtcatcacatgtctaagtataaacatgttacaggcccatgcccagtagatagtttttattttatactggaaaaaaaaaatagtatccttgtgcctactgaaaacaaaggaaaacgtaaatataataacatgtgtttgggcatgcattcaatatcttgtgtatataaatagagtgatattgagagaacagttatgctgaggcagcctgacagtcccgtgacgtactggtctttggagctcaaacaggtatacgtttacctaggaaaacaaaagcttgtcattagaaactgttattttctcaagtaatatttatgaaggctgagatttcccccatggttggcactgctagacagtttaattcaaagccatctttctgtcctcttaaagcagagtgggttgaagaatgggtgttgtgtgtttgttttaagatgtcaggccaaaaggaagagtggaagtttaaaagaaaatcccgtgtcagttgtgaaatcctgtcaagtagaaatgcagcagaaatatttttaaactttgtgaaaggggaaataggtattttgtctttgtcttgagcaagtgaatgataattctgtcagctctgttagacttgtattaagaaactttagtcattcacttcctgggccttcttgtcttcaacagggcagtacaatcacctaaaatccttgtcgagataattcagcaatattataaaatgcattaaaaagtgtcagtgtctatcagggaaaatgtttttattgtgaatgtattttttattatgtgtggttgttatgatttctgaggttaataattacatttccagattttgaccttaagcagggcatgatggcacatacttcctttctaaccctggagcctctgaggctgagatgggcggagtgcctgacattgaaacccagcctgggcttcgtagtgagtccctgtaaaaaaaaaaaaaaaaaaaaaaaaaaaaaaaaaaaaaaacaaaaacactggaaagaatacaaagaaaacgaaaggaaaggaggttgacctttgtctctgaattgtggatattgtgtgtttcatagagacacggtgtgctgtttgccaggacattgtgtcatagcttgctgtggcactccatttaatagcatgtgattcctgagggcatttgatagaactagatgcctctggaagcccagagtgacaagcctatgcactttagtttcgtaaggccagactatttcagggttgtttttgagacatgaacctcagatctgtccccaacatttagtttgtcagctcgttgagcctttcctctcattttccgcctgtcatgtaggacaagcgcatgtgtgcagagcttttttggaatggagaagggagatgatatgtatatatatatagttgtattgggggagggcacccacctatgggacttctattttttatagcctttgttgcttataaaagtaatgtgttgattataataaattttgaactatgaaaatgtacagactagagtcagctgggatactagctgtggaacacagactcaagtccttctttctgtacattcacgactattagatattaccacaaaagcaggatcatgtcagacatgactgtatgtgtctttaatcccactctggagtcaaaggcaggagggtctctgtgtgattccatgccagcctggtctttatagcaagttccaggccagtgttacatggttagaccctgtctctcaaaaccaagtcacaacaagcaaagcatggtcatgtcatatacttgctgaatataagcttgattaaaattcacaatatatatcaaggcaggttttcatgttctaatcatttcctaagattgcagcttgtacacaagagtactgaacacaagaattctgttcttattccaaaactagagtatttcccaagaccagctggtgccaactgaaatccacaagtcagaagtcaaatataatcccaattcttaattcacaaggttcttccttataaaagttgctaatatatatgtgactgtgtatacatgatcaaactgtctaattttatcttggcatttcaacttcagttgagttaggaaggttttggaaaaggaaaagaaaacaacttactttctccccttgagtattctggttggggtggggaggctggggtggtgaagggatgggggaggctggggtggtgaagaggggtggttggggtgatgaaggaatgggggtgtgcccaaagcactactttcttcttgatcacacaacagaggcacgctaaactacctagccaactgggaatttcattttttcctgaaccacctgtttctcttctccactgctttctgaccccagaaaggggaatagtagggaaggccaagggtgaagcaggcaaactcctttcagtaacctacttgtgccaccacagagtctgcgctggcctacagtggaggcattgttttctttctgcttggcttatttgctgcttatagttcatttcacaaagaaaacacttttcttaagtggtgaagtaaaactttttacctcatccctccagcccagccccaacttggctgcagaccaaacccactgagctaaatttctcaactccatagtaggaagtttttttaagtgtataatttagcagcagttactttctcacttcctcaacagagtacctcacagggacaacttaaaagaggaaggtgggaaccagggtcagagagaaacacataaggatcatccccctccagtagcaatttccccacaggccctatttcctaagggtagcgcagcagggaccagctgtaaacgcaggagcctgtggagggcatggcacaggcaaaccatggcagtggtggtgggaattcagtggcgaaggaaatgtccatttgtagaactttgatcatctcaaactgaaaactttcagataatgaagaaaacgggtccttaatgctaaaagcgactggatctgaagtgaactgaaaacagtgacagaagaaactcaaaagactcctccattgtcctttctgctctccacccactgtttcagtgacacaggagagactggatgcttttccctgtagcagagacgcccccagcgtcacctgcagctctctctcctgttcagagcatgttccccggagtggttttgcaagcagtgttcttagtctgtctctcctacaccacaggacttagtcttattcttttctttgtgtgggcccgcatgtgtctgcatgcagaaaccagatgtcagtgttgagggtcccttgtaatcactctccactctgtgtttcagacagggcctgtgactgaacttgaagctcatgtacagcgctggtattgtaaacaccgtttgccacatcaggcttctttctaagtgctaaggattcaaactcaggtccccctgcttgtgtggggaacacttttccagcctagccatatccccaatgtctagttcttaaattctcagtgaaatgtttgttgttgtgttcattcatttcaataaaaaggagcagtatagtcaacaccctgaacaaagcttacagtcaatgagaacattagtaaggaaatcttggtgttgatggtacagggaggggcacaacgatgtttgggcactgggttctgagtggtgtctgagcagtttgtgcctcaatgcagtgtgcaccctctgattgcattcgggtaggtggtggtggtggtggtggtggtggtggtggtggtggtgtggtggtggtggtggtggtggtggtggtggtgtgtgtgtgtgtgtgtgtgtgtgtgtgagcagtttgtgcctcaatgcagtgtgcaccctctgattgcattcgggtaggtggtggtggtggtggtggtggtggtgtgtgtgtgtgtgtgtgtgtgtgtgtgtgttgagacagggtcttgctatgtatcccaaactagcctggaagtcacttgtgagcccaggctagcttctaacatgccatgtccctgccttaactttctaagtgccaggattttaggtgtgcattaccatgccctgcccttccatgaacatttctaaagatttgtccttacttgctttttaatattccccatcatcaagaaataggaattatggagcataagtattattaaagaattggatgaatggggctgggttcatgctcagtggtagagtaaattcctgtcatactcaggtgccttgagttcatcccagccattaagagaaagactgggtagatggtaccttcccttccttgtacgaggtttagaactggctgttgcttttactgaagttgaacagagactcccctgctttttcacacattggctagttccaagtgcactccttgcttccttagctccagtatactttactcacggtctgggatgcatagtgatttagtgtaggtgttcagtacactatgggttgtggaaaccttggggatggtttgttaatgctgccatgtgcagtgtgctattctggtgggttacttactggtatatagtagctcttaggtgggtactaaggtagtaagaagaggggctcgcttactagacactagtaataactcattgtgtgtgttctccattcatcagatattaaaagccttttctgggcaaagtgctgttcgcatcagctgaaaattgcatgttagtgtggacttcagattaaaatgttcagattagcaaatagatgtgcatttctgggggtcgcgaaacatctcagaccttgctgctgtgattgactgtgatagagactggcctgggtcagctttttggacatggtggtgtgagaccctgcttgctaattagctgtgtgtttatatagaagaacatgtagttttctggctagattgtttacagcacataagtagacttaaaattcttagttgtgtgttttgaattttaaatggatatgaatgaactaagcctccctgtctccttttggtgtgctattaatttgaaaaggttgttttgttggagttatccggctttaaggaagaaatatgaggcaagaaatcagtaagaccagggaagtggtccccaaaatcacatgagagcctcttctagggaaaaggggtgtgtgtaagctacaacagaatgtatgggtgcagattttaggtttatgaagtattacattgttctcaaaatcatgaccaaaaaattgcaatgaagtagaatctctgaaaatgcttcaagaactggtatttggatgtcttgctagaagagtccacattttcaggcaaaggataaggttcaggattttgagaaggagattatgctggattatccaggtaaactgaaatgcaatcaggtttgtcctaatgaggggcagggagagttggcacacagacaatgtaaaggcaaagcagatggttgatggtgacatcacaagctgaggaacatcatggaatgccagcagacaccagatgattgggggtcagcagatctttctccatagcagaagtgggtgggggcagaattaggatagccccacagacacctttattgtagacttcaggtccccaaaaatctgagacccaaatgcaccaatatccaaaactttctggtaccaccttgatgccatggagactccacactccgtgggctttcttgtggccttcaatagtttcatctgggcaagttagtgtctgccttctgtcctcccactgagcttctctctctaccatgccattgtggggtgcactgcttgctcccccagatcctgtctccattctgtcttgaaacatggtgcatgctacaaaatagcttgcttggagctgatttcttcactagtggctctatgcttcttctttcctcttccctttgagccatggactttctgtgcaacccaagacgatctcaaacacagcagctgaagccttcacagtacctaaggttacatttatgcactgctgtgccaggctagtactttagtactggctggccatgggtcaagatgagaacttctggttgctttttctggtcctgagttcctcaaattttattttcccaatctttaagcttagataatagcccccctcaggctgcaaagatattcagtaataaaaatatgaagccgtaatatagtaggagaaatgatagtcaaagaggttcagttgatgcaaaaggtattcagaccaaatcattaaggcaagggagtgacctgaactataaaggatgactggggagagttatttccaaaggtgcctcaggagcaaagaccccgaaatcagagcctgaaacgagagcacacctggttcctttgagaactgccgagctagctggctagtgcagtcagtgggagtgagaaaatgagcgcatgtcatggctggatgagaggaggggggatgaggggaaggaagtaggtggcagggcccagagcaaggacatgagtgaagctgagagcttaggctttttccttgaatagcttcaacccatagggtttgaacgcacaagtgaacttcaggggtaaaggtggaaatgggaggaccacacagtaggggccttagaggtgataagacttgaagggaaagctaatggatgggctctcatagattagaggaggtctgtaaaggggtctgggagatgttgggtgtgtacacagctgagaggttttgccccagaagaaggcttgtgggattgtatgttcctgagccgaaggagacatgaaggaaggggtaaatttttaaagagcaggaatttgatttggccattttcatctagttaggcaaaaaacaatgatatatgtaccccctggggcttacagaatgccagcagcagcactttgtacacattaggtgctcagtaaatgtttgcttggactctgattcgtgattcagtttttacaatgaggcttcatcttcagtcttagctcccttgttgctggctctctgaaagacaaaagctcattaagtttataaatagataatattcgagctgtgctttagtgtaatggatgtggcactggccctgccagagcctttggtaatctcgtccctgagtgccatcaagtccctttaatgaatatgatctctctatagtatgtactgagctctccaaacccagaactctctgaggacccaagactcttgtgtttggtatatggtatgattgctctgccatgtaagtgaaacatagtttgtaatagatacccacaggactgccattcttattttacagtaagacagtagtttcccagcagagtttgaagagcattgtgtgctacctttacctgctaaattctgccttctcccatatgccatcataattactggtctaagtcgtttttctagttttgatcttgaagagtgatatgtatatatattttgactaattaaatcaatatttttccttgatcatatctcattcataataaaatcacctgtggcatttggaagctaattgcttcatctccctgtttatatctttaaaccatctgagaagtttctgaaatgctttttaatgagtggtgtccttcctgggttttgataacgtaatgctatctttgctgtgtgagataacttttcatctgataacttaagtgctaatgtaagcaggctagaaaagcaagctttgtgggatctggacataagaaagtcagtgtaggacagtaatacctgcagcttttctgaactgtaaggtaatgtgctgcacaggtctgcctatattctccctcttcctaccagtatctccattgctactccagaacaatgagcatgtccctaaaggatgtagcagtgttcatcaagaactgttgggaaatgtccctaagatcctatactaggctgcatttcctgctgtaattaataccctctctgttttcccccttccttccttcctctttccccccatcctccctttctttttcttttttccattactgaatattaaacggagggccttgcaaaccctaggcaattgctcaacaactgacctgtatccccagcctgtaaaatctgattaggtaaccctgctaaagaggattaatatagcattgaagagagtggggtttatttcttataaaagatgagtatgcttacagtgagataaactgagtgttttgtttttaattcatcactgttcagataatctataaatttgtgtaatttcagtttttatgtttccttataccaaaagatgaaaactcagggaccctcgatagacctttcctttgggcactgctgtggggtggttaattccttttgtaaattttagaaattaaggggtgttttttctgggaaagagcctttccctctttggtggaatgtttacccagcatacattaagcccaaggttcagtcagcagcagtacttaaaaacaacaacaacaataacttgggtatagtggcaaaacttgtaatcctctcagttggtgtggagggggactttgatgccagaaagactttgatgccagcctgtgctacttgagatcctatctcatttaaaaagaagaagggaaaagggagtggtgaggagaaggaagacaaaataggaaacaattcagttttttgagcccacaatatagtccagtggataaggatgcttgcccaccaagactgagggacttgagttcaatacccaggcccacggggtggaagaagatcacggactcctcctacatgctgtactttgatccccacacatactcatggcatgcacatgcctacacacatacacacaaaataagatgttttaaaggagaaagcatttaacagagccatgagctgtttgccttacctgctgtggtgttctgaataagtatggccccactggcttgtatttgaatgcttaatcactagggagtggcactatttgaaaggattaggtggtgtggccttgttggaggaggtgtgtcactgggtgggctttgaggttttagtagtccaggccaagcccagtgtctctctctgcctatggatctgcatatagctctctgctgctgccccagtgcctgcatgcatactgcatcaataatgctgggtcaaaactctgaaactgtaagcaagacaccaagcttcctttcataagagctgtcttggtcatggtgtctcttcacagcaatatgacagtagcaagaaatggtttaattatatcgtgtgccagctctgaagcagtaactggaagttgatcagggtagcacagtgtagaggtggactcggccatgcgaaggcagaaaggggcttattggacatgtagcatgcattgtgttttaagaacaagatttcaaagatgggagtcacaactaggacttgaggatggtggctttgtacaggggcaagatggaggccatggcagaaactccagaaccttgtgattgaaatacaagtgaagggggtgagttcttgaccagctaagcagtagcattcccagaacttggacctttggcaacaccgtctcttgtttagatgcttcattgccaactcaataaccaaagtatagcctcttctgatatctaagtgtttttaaccaatgaggttgaatctctttctcttttcttctctctctctctctgagtctctctctcttttcctctctctctctctctctctctctctctctgagtcagtctctccctctctctgtctctgtctctctctgtctgtctctgtctctctctctctctctctctctctctctctctctctctctctctctctctgtgtgttcctttgatcaagcacctggcctcacacaagctaatgtatatgtttgtgtgtgcttatttatacgtgtgtgttttatatgtgtatatggctggaagattttcaggccctgtttatttaaactctttatcagattttaaagagcatttcagacttgtaatcgatatcattaaaaaaaacattttgtcctatgatgttgcttatctttttacttttggagcattttgtctgtaggtttaaagctatgatttatacagttatgccatctatgttacaagtagagactaacgcttgtagacttgagaaaacatttatacttactttgaacttgagttctttgcatgtgacgcgccacagtgatggacacgcagctcttcctgagagaacagagcctattagacccaatgctgaacagcctaccatgcttcttcagatcttagccatttaaaaaattattttagcatacttttgttaacgagctttacactttgtatatttataatgtaattgtaagtcagtaatcaccattgaagttctcattttattttattgaggtaaaacttattaaaattttatataagacaagtctatttcagcaaagctcttagggataatctctctaataaatggtgatctctgatatttaggtttttatatttccttggggtcctagaaatggttttgtggattgctcagatatataaaaatagctatgttgctaaaggtctgtacattaaaatcataagggttctggggaaaaagtgtcaactggtgattcagaaaacagaggttgtggttcttgacatttcattccctacttgacctcctcttggaaggatgctccagtgtcctttataacctggtggctgctggggcaccctgttatctcattactgttatgctgccccctggtggttcacaccttagctcaaagacaaagccagagtggcagtctctcagtaacctgatgctgtgctgtggtgctgctttgcatcatgggtaaggctctcagctgagtttttgttgtttgtttgtttgtttttgtttttgtttttaactgttagttgaaaaaaagagggttagaggccttagatggttttaattaggaggtcttggaaccaaggaaccacagataattggagagaagttgatgaatggttgcttatttatagaaactgacacacttgctgcctggaaaagacacaaatgtggtgtgtgtgtgtgtgtgtgtgtgtgtgtgtgtgtgtgtgtgtgtgtgtgcgcgcgcgcgcgcgcgtgtgcgcaaagggagaagtctactcttgttttccttgacgtcttcaatcctgttttacccctggagagagaagagagagagctcaatgcagtggcgacctggacatggtgcttctgtgggcatggatgctcacagcgtgcacactgaagagccatccattcacaagtcccatttgaatgttctatgctctgaacttgactagttatcaaagaagcgtttgcaatgtattttgggagagacacttcaacttggtttctcctatctgggcctgtgcattgttgctaattttacacctggtgtcagtccccagggtcatgttctttaaatgaggttctttctctgcttcagtgggtggagtttataagcaaaggagttccttggtgaaataggagacttttagtcaacagtgggtatttctgttcctcagtagactaggggagcttactttgtctaaaaaggatgtaaaggatttttatattaattaggaaactgttgtctgcctgcctgcaccagtttgacacagggtagtcctcactgaaagtgaaggcatgcttttagacagctgctgttattatctgtggcaaagttcatagattattaacagccatacttcagagttaaaaaacaatcatgtatttgacaaaaaaaaaatctatctacttgtaggtagaagaagcagtcttgaataaaagtaatttataaaccaaaatatttagtcttaaaggacatgttgatggtatatgtgagaagggagagcactttggaaaatctagagaaaatgcttactgtatgttaagatataaagtacactctcggttctgcttttagatgtcagtgacacagagtgagtgtaaatgctgtggttcccatagcacagtcagggacggggactgaatggcatgactggagtgacatggaggaaaatgcagccaaggcgaaaagcaggctgggatggttgtctgtttttttctttgttctcgctcttccttaagataattaatatgaaataataatagaagtatataatttcagatgctgtttggaatgcttgatgaaccttttcagtttggaaaattgtatcccctctacttcaactttttgttgttgttgtgtttgattgtgtagccctggctatctgggaacttaccacatagaccaggctgacctgaaccttgcagggatctatctgtctgtctcttcctcccaagttttgggattcaacttttttttttgagtgatttctatgattatttatacattttaaaaggatattttttttatctttttttctttttgtattttctcaagcagtgtcatgtgagaaacctttctgcagaatataaaaagcactcaggcatgcatgcatgcacacacactagcacagagcatgctcactccaaaaagggagccagtgacagactaaagtagtgattacagcagagtccaggttggtgaaccagtgggtttttattgaggttacaaccagagtctgggtcagaggttacttgcaggagcagagacttctcagatgtagctgcatcgtgaaaaaagcccacccttagacctcaggaaagctgcatctcaggggcccttggcatcacatgcgtggctggtcggtactttctcctctaaacagctgtttactgtttcttccaagttccagccttcccagatttgtgacatttacttcttacaactgctttcctccaacatgctacttggagcatgcaaatatctgccgtagaatctgtactgaagccttttggttttgtttacagtggtgctgggaactgaacttagggcctcacacataccgggcaagcactctactactgggaatgcaccactcctatattcccagctccctggggttttaaaaaacaagcctaatcagttgggtttttaccattttacttttctgacagattcagagctatgcatatctttatagtccagttaataagcatggtatatagggatttgagctcttggtttttaaaaagaatgggaaggcacagaatgaggtgtgttgggaaggagaagctcttctggctggatgacattagcactgtaaacatctgctcatatgagacttgctggaatttgaaacattggctatgctctgacattgtccagtgccactagagtgagtccagatctaagaatgacagattaacaggcaaacaggacaggagccctgctggttctgagcagaggcagctggttggttatgtgggaatagattgtcttcagttttaagtgagttacaagaatcaaatccccagggaaacaatagtgatgcgttttcagagagctgggcaaggtttccccattataacaaccagggaagaatttctaagaggtcctttccattttgtagcttcacctgagtgggctgatgctgcggaaacttgcagtacgtagttataattctggctcgttttcgttgtgggacagtgggggctatctgaacctgtagttttgtcatgctcctagggttaggcttcagttttatcgttgctggtaaattggctcatttctaaggactgtttcttaatgtaggatttggggttctgattatagattctagttatgtcatcaagcccattttatatttctaaagcaagctggtataggaagtacgttctcagccttgcagtgcagccttcatattttaaagcattatacctagaagaataacaatagttttttttccctcttccagataagaataaaatgtgcttatcagagagattttaaaatactgggaaagaaaaagcaaatcattactttataattctgttactccaggacagcaggaagttaataaataatgccttgacgtttatcccatgatatttatcatacattcgtattaacaaaattggcactatttcatagctgatgttctcttcataaagttgtagtatcactgtaaatatagaaatgtgctacgatctttagtggggacttaatcatttgttgtgtaataaatttttaagttatttctaagttttgttgtaataaatgatactttggaatctctgattactggatatttagagggacaccctatcatgaaatgtctgggttggggtggctttgctggtgatggggttctctgaaatagacagaaccatggttcatagtacacagctggcacggctgctttcttgtcattatattactattaattttgccaaccaaaagtcactcccccaccccgtacattgaaggttgctacaactcattgtagtccaaacatttgtgggcgtggagtgaacaagggagaccgttagctaaaccatgggacagccattggcgaaagaatcgtctacagatggtgggaaatctgagtattaaacacaattaaataaacaagatcaagtggagcccgaaagatgtcactaaatgcagaacttctcagagccagtgtcttagcagctgagtagaccagaaggcagaggtgtgtttttaaaaggtcctcctcagagctccccaaagtaggtcagcatacacttagctggaggagctgctcataagggatgatttgtgagccaaagctggattgtggacttgtgagcactgcatgtactagcaattgaaaataaaggccaggttattgcggccgaaggaatcttctaaagtccccaaattgtagaaatgaatatgtagctctttcactgacattgttactctgacctttcgtgtataattttataaattcttacttaaattaactcttcaagtgctaaatacaaagagctacatcctattagagttgctttgggaaaacattcagcggatatccaaattgagtttctggagaattaaacatttcattgactgcagaggtcaattaggttattgttgacatttatggaaagttctagtagattccaaaacctttatctaaacttgaagcctttggaaaatgtcaatttgtttcatagtaaagtgatacaaattattgacttggatttcattttgtaatcaattcctaattctagtcttttgggggagatgctgtgtttttgttaagatttatgagacatggtcttgctgtgtagcccaggctggtcccaggctcaccatcctcctgcctcggactcctgagtactgggattgctggcataatgctttaagtgttggttttttgtttgtttttttttttgttgttgttgttgttttctcaaggcagggtttctctgtgtagctttggaccctgtcctggaactagctcttgcagatcaggctggtctcaaactcacagagatcctcctgcctctgcctcaggagtgctgggattaaagatgtgtgccaccactgctcggcaatgccttagtttttaaaacccttgtatccctcttaattctgttaggtgtttattagcacaagtctgttttatttctaggcttttctgggtgacaaagccatgcaatagcttcctttgaagatgtataagcaaatagtcctgaaagatttatttggtgggttttgcctggttgaatcgttttcacatttccagaatgattgtgttagctcatattttcttccttgaaggtctggctttcataattaactataatatttattgtatggtggtgtggcatatcattgaaaggcttttataatattaaagactaaaatctattttaagaatctgagcccagttgagttttgtataattatttttcacttggttaagatcaaatagaaagtccttctggacttgggtcctgtagtgaacacgtgctgctggtctgtccttaagtaatagagtgccccactgctgagcactttcagaccccatcctccatgctcaaggctattgactgttctgcaacaggtgtgccctgcaaagctccttggctgtagagccaagttcttccctatgaataaaattttaaacaaatcaaaatctgattctacatcgtctctaagaagtagagatgaatgagagttcccataccttctctcttgctctcaaattctggaatatttcaggaggaaatgtttatatcgttttcatttgtcttgtatttcttcccttttttgtacaataagtccaataagctgggcagtgtatgagttcagcctaactttttctggaggatgatggctgttaactaagctgacctgccttctaggtcccgctgtgaagacattttgcctgtctccatgtggaaatgcttcactcaatctccactgagttgacagaggccaggggaacaatgactttctctcttctgcatctatagccagactccgttttctctgaacactgttgctagcattgaccattgaaaagctaaacctttgtctgttaggtcacttccacagaaatgacttttcccagttgcctaacttcagcatcggctgcaggaaaacagcacaagtgtttgtttccaggcttgcttaaaaataaaggtttgttttctcataaggttagaaaactgtctttagccctgggttagagtgataggacattggaaattctatctggaagtgacagctcccaaaaacatgtgtgaagtgtcactgcgggcccaggtggccactggaaaagatggtaggatgctatttatagaataacatgcttaattgagaaacatgtggcttttactcctttaatgtggctgtgttctcaggatggttgtagcctgtgcgaaggtgggtgaggtagttattaggtttgtttttcagtcaaaacagcctaggaacaggtaaaggacttcactaaggcaccagtgttggctgcctgacatgcttctcctccagagcatcatctgaatggtctcctacataaacacaccggatggttagattctgttgtgtgtcacagatattagtgaggaagggacttggtggctgtagaaaggcctgtgggtgtagaagatcaaggagaagaagggattccaggttagggaaagttcaggattcgtgttcaagagggaatggttttgtagtcccattggctacagaatggaggatgctggcctaccttgtagcacactttggagtgttccaacgatttgatggacttgactttgcaggattcctgttcctctatttagttgatgcttgaagagcttgccatgccagatagatgtctggctctgtattaaattgtctcccacaatttaatttgacttgtttctgttttgaagtttgttaactcctggtaagaaatggtttgtctatttctctatcagagagtattgataaatgtctgataaatgtcttggccttgatgtagtctgtggttctgagagtttccgacgctggcacgcttcctgtaatgggcaagaattgggggttgaggaacttaggggaaagccagtgtcctttccccttgggcctcagcatgaaatggagatttttttctttagcattctcttgcagatattgagagtttcacagacagttaccctagatctgctggggagtgttcgaggagaggccttgggtctcgtgcctgagaaacagaccctctgtcttttacagtctgtgcaaggactcttgtttggcatgcatgcctttggcactctaggccgtgctctttcctgccagcctggtctcacagctgcatcagtcccaaaggaacacactaattctgtattaattatgaaactgttggccaatgtctagggcttcttattggctagctctgacttaatttctaacccataactgctaacctatgtatttccatgtggtcttaccttaccacatggagaaaggtcccgggacctcttactcctctggcgtcctacatctcaactccctctgcctacatttctcagaatccttctcatctcctagacccgactattgtgctgccctattggccacagtgtttgattcatcaaccaataagagaaacatatgtgcagacatccccatcacactgcagttggggttcctctgcaacggttatgagtatgcagaagtcacatggactttctctctgaaaaatgatcgtaatttccttgattgttcaaggtagtttaaaagacattttaatattagtgacatcattgggcttattttccattaaacagacggcacaatgctcgggatgttgtgaagtcattgaccagttattgactgagtgacttttgagccttggggacatgaaatctgtggctgcttgcagtagctgactttgcaaggcactcagctgctcctgggagtctgcaagtgcttaagtaggagagagagagtggcagggacggtatacagcacccacagtacttaggagggacttggttgtgtccatagggttggttctgctgttggtactataagaaattggaaattgggaagacacgtgctgtctgttctcaatctagagtcaaattgagggttcagtgtgagactatttggaaaggaaatgggtcagggagagtaggtaaacttaaggaagtcaatttgagaatttccggtaagcgttttctctatttgggaatgcttcaagtgtttaacatcctaatatgtgcacagtgggaagatgatagtgtgcactgagtgtacttggtggaagaactatccttttcaagtactagacactttaccagatactattccatgaacacattcttagggaaatggtgtcactcataatttccagcttttaaactcttaggtctgtggaaagaaagtcttctatcgttaacacaacaataatcatttcagaaagaaattcagctggtggggtttgttgttagtgggagataaggtggacagaggccttcgaatatgattgacaatttgaaaaaggataaaaaaagacgtgcaccaagaaactcctcagaaaaatcactacttacagagcttggctgtgtcatccactttcatatatagacacagtcattgataacaacaaccctatgaaggaaatatttttattgttactgtatccattttaaagatgaacaagctgaagcccagacagcagggcaagcaggagagatgctgggaccaaagtcaggtttcatagttgttgctttcatatgaagttgggtcttctgctttgagtttttttttttttatggttgttataaaagtaaattgaagtctggcagaaaaatgggaatacactcagaatcatcaagtgtgttctagcttgtttgtgtcttcccacttttttcctgcaatgctgtgcatcagtcaagaattgtgcttgcatctgttacatatgtgtgcatccttccattagggtcctccctaaagcctttgttacactactggttaagtattttaatgtacacatacactggacttacatcccctctatacattcaactgtgggcaagtcctttgacttttataggactcattcctcttttatagataagaggctgatcaagtcctcttttttcaaatcatggggatctgcggaagtggggatctagaaagaagtatcaagggtccgaggatcctgggctctgtctgtgtgtgtcaacccagtcagccacagtggtacccttttctatgttagggttcacacatgtttagacaaaacaaactagtggggggcagaaaagcttggaaaattattggaccagatgatcttaagatcagcatttctgtgatcttcttctgtgatacctcagatgtcacatattgtgttcattttcagcattcctcaccagagagattgatgggttaaacaagtttgccagattctgtcatattatgtcctgaaagtgtgtggggtacagagagaatcaatggcgcccactgagcagggtccagacgctgttgagttcttcttgataagtctccctgggagatccatccactgctgtccctgaccttacacattctcagatccaatttaatgatctgtcacggaagccttacaaccagggaattggcaatgcttgaaactaacacatttaaaccgtttgctgatgactgcctcccactttcattacacaccccgacgacgagcctctttgcattttgaagaaaccgatgtagaagtcccatgagtctgaccttctcttttcctcccacagaaggaagattctattcagaaatgaggcgaattaacgttcggacaccactacacggagtgttttaaactgccctgaccatcttgccaactgagtctcggctcatgagatccaacaagatgaaccggccaaggagggatagtgtcctgccctgtacgaacagtgactgctgacgtctgagagcaagttgggggtactgcgtattgtctgccagtaccatgaaggaagtggtttattggtcacccaagaaggtggcagactggctgctggagaatgctatgcctgaatactgtgagcctctagaacatttcacaggccgggacttgatcaatctaacccaagaggatttcacaaaacccccactgtgccgagtctcatctgacaacgggcagcggctcttagacatgatcgagaccctgaagatggagcaccatatggaagcgcacaagaacggccacgccaatgggcacctcagcgttggcgtcgacattcccaaccctgatggcggcagcttcagcatcaagatgaaacccaatggaatgccaaatgggtataggaaagagatgatcaagattcccatgccagaaccagagcgctctcagtaccccatggagtggggcaagactcttctggcctttctttatgcactttcctgttttgttctcactacagtgatgatctcggtcgtccatgaacgagtacctcctaaggaggtgcagcctccactaccggacacgttttttgaccattttaaccgggtgcagtgggccttttctatttgcgaaattaacggcatgatccttgtaggactctggttaattcagtggctgctcttaaaatacaagtaagtagagtacacatagtcttaagatccagtgatgatgggtttgcatcatttttctgtctatctagtcgttgtttggaaataaaatatacccaagtgttgaaatcaaagcatactagttagttttgaagcctcacatccccatgggactgactgaagctcctgcagatttgagagaatattgtgtttgttgcccgtttgatacaagattcctccagaattaagactgagtgacggtggtctgttttcaggtaataagaaagcaaacagacattttcagagagggaaggctattgagtaactgggagtggtggtggtgggggggatatattggttggttatttgttaaggcgaattgttggcagttggcctaggtgctgtgggtaggaggattgttctcctccccaaatcccagccagacctggaaccttatcagtatatattcacagattttgacatgtagagttcagacagctgttctataatgactttggctgggggaaagtgatacctcattaatttaagcaggtagaatgtggtgggaccggtatgattccatcttatggaatatgtggcacgtaaaacagtgggtggctgtctttgagtttctcagtaagtctatatggagttttagtcgaatccaaagcgagtctcatttcccaatctctaatcccagcagggattttcaaaagtgagctatttactttgataaacatctttactttgataaacatctttccttggttttgatcaatttcccttgttcttggtgtctgtgtttttctgagtggaacatacttgtgacttccctgtgtgcagttgggaatgaccatttctccctacccactggacttgagtgcaccagtaggaggtaccactaccctggccacagcccaagcttgctgctgtcgcccctgaggcaccataaccaaatctacacagtgagcagggccatgcctgagactaaggccagcactgaggctgcttcccatggacctagagctgtcactctgggcagcttctgatgatggaaccagcagctgtttgagtttctctctggtagactgagttgcctgagccgaagaatggctggatagtaaaccatcttccatcaagataacaaaaatgcaggtggagcatttctgttgaatttgtctctgagtgttttcctggtgttggattaaaccctttcccagatcataaagtcagacttccacaggtagaaagggaagggttccggctgacctcaccagggagacagccttcactctggtaaagtttacttgggtaatttgacaattggctggtttgacagttttataactgaagtagaatttgaaatggaactggtgggccctgctgtgtagttgaagaaaagaacaatgttgttgccttggctctgagaggaatcagcttcagaaatagtgatgtttgggattccttgcatacaccctctcgactgacaactgtagtcccactttccacttaggaacattttgactcttcaccttttctccctaaaagcccactgaaaacatttcccacgcttttcctttacagagggaaggacagctcacattaagcttcctagggtttttgttttgttttgtttcccttacagtttattttgtttttgtgaggtcactttctggctttccatcaaaatttgcacacacaggcaaatttatagccttggaatataactcggtaagtcagacttcctgcagaatagagatattttatgatttcagtcttattctgaggaagtttcttaaccatgggactaatttcttttattttgctaccagggaatttcccccaaatctgtttctcgttacattttttaagttggtgtccttctggtacttactgccaccactgtagtactttatttatttaaattgttcaacagcaataaaccagttggaatgctgtctgcaaagctaattcagtgctggaggaggcggcctgggttctagccccagctgtggctttatgtgctaggtggcttaaatgaactttttcaactagggagcctagctcctctcacagaagaaaataatgtctcggtcatggtttctgttgtcctagaaaacttaaattggccctagcattgctgggtaagtcgctgtgatgggattggattagtcaggtaattttgacttgaatgcaagcagctaaggatcccttaaggtcctcagtctagtttccacctttggaagttgactgttgtcctaagcacccccctccccctctactgtccgtcacctctcccagtgtatgtggcactacaggtatggaagagggtagatggtacaaactgatagagtaagaagtgtacactgatgaataccatccctggctctcatcatgaagactaaaccttttgtactattctgcagacacacaccctaacacacacctacacacacacccccatttctagctaattgactgttgctgtgggacagttttatttatgtaccattttgaaaagatcttgttatgggggtactttccctccctaactttccttgttttggtgttccactcttatgagtttggccccctctctccagcatccactagccaaatggtttccctttaaccatttttccactccttagaatcaaagcccaagttccaccccacccccaatcattctgactttaagaatcctgacatccatcctgttatcccttcttcctttgtactttctgacgagagaagaggtgatgatgtcgaggatgatgcactaattgagaggtgagacagaccactggaattttgggcaacatcagccaccaatgagtcagtcctttagccagacttttagggttctgaacacctttgttctgaatttgtcatgttcagttctgtcttatgttgcacacagttgtccttgactgtgaaagtaggttctgaacttttttgtgtttttaaaattgtaaataatgttttctcctcatttagaattggactttcaacccactgactaggaaaaatccccaggaaatctctgcctttgtgtcagacttcactgccaaccacgtaccccttgttttcaccataaagagtatttggagcttgcagactgatagagctgagtgtggcttctgtgttgctctcagctaacacggtggcacccctgcatggttcctgtggccctaccctgtcaggacattgacccttgacagagaaggcagcacctaggtttccaagtcaggtttccttattagggggagcataagaccaattgtggtgatcagtatgcctcagactctcctggacccaagccagatttgtgaactgtgttttctaacttgttttccctcttctctggccagtggcattttctagaaacatagaacaactcagttggtgttgtctaaatagtgagttaggtcaattctaattctgtatctaggcatgtctcctttcatttctcttgttgttgttgttgctgacagggtttctctgtgtagctttggagcctgtcctggaactcactctgtagaccagagagtccttgaactcacagagatccacctgcctctgcctcctctgagtactgggatcaaaggggtgcactaccaccgctggctcctcctttcatttctaatcagggattcacactgtggaatcagatgaagatacaacttcttagctttgaagcttggggctcttcatatggagtttaactccgccctgtttttcctgcagctattccagttctctgcaaacaccttaagctcatagcactttccattctctcagttctctacatgtgtctcctccagtgctggtttttttgttttgttttgtttaaattttccttagaggagaaaaatgatgccatgttcatccctcccacttgtaccctaatgtgtgtgacagagcctggcacatttaaaatccatccactcattcaacttgagttcacggaggatcctactatatgccagccttgctagaccttggggaatgctgcagtgagaagagtgaagtgattaggccgtctgtaaacagctgaggatgtgacatcagctagtctaagggagatagagacagtgagtcagcataagggattgggagtgttggaactagggcagaggtgatattttcagattgggtaattatgaaaggccacggatgagatagcagttcagcagacacttgagtcaaatgaaagacttatctgagaactttccagataggagacatagcaagtgtttgagggtgggtttatttctctggcttagttgggccccaaagtgtttgtaatggcccagtgagctggagagatctgtgatgtaagagtccagtgaggcgcagacagggtctcaaatggagccaatagagtgtggatttcatgtcaagtgtggtaaaccactgacgtgtaatgatacaaacacacttgtggaagaattaggtagggggtcagcaaaatgctcagttagggcacttactaccaagcctgaaaactggagtttggagctcagaattcgtatagtagaaggggagaaccaactcccacaagttgtcctatgacctacacacacacacacacacacacacaaataaataaatatgaacaaggtttaaaaatgatatggctgttgtgtagataacaggatagcaagagttgaatccagagaattgtctgtgacacccattgccatagtgaacaaaactgatttctgtaatagtacatttctcacacaaagccttggatctgcccatggagtcctgatttctatatgttatttaaagagagggatattccactaattcagcggtactcacaactgttcttggatatatcttctttggaagaaagtctagtagtttacgtaagcattgcagctcagatggaaagggatcctggcagttgggagctggagttgaccataaaagtcaccataaaggtgtcagcttacagtcctgctccagggaaaggtttccccaatataagtgtcatagctctcccccaacatgggagacttttcccagcaaagttgttacagctccactcccctctgttccagcaaagtgttacagctctgctcaggtcctgggatgtgttacagctctactcaggtcccccagagtataacaattctgctgggctaggggcaagttttcccaaggaaagtgttacagtttactttggtctggtttgctctggcaccaggggaagttgttacagctggactccactccagtgaaaaagtcacactgtacaacaaacctcactcaggagatttattggcaaggaagaatccaggagggtggctgcccctagggtgagaagcagcagcagagcgaactgggtacagagcttatatagggtttctttgtgtgtgtgtgtgtgggggggtgctttccagggaggcttgggattggtggatttttgtagcctgattctggggcaaactcagggattggtgggatttcatgctcaggacctcagtgattggtgggactctctgctcagggattggtgggattctgtagcctgactctggtacaagctcagagattgggatttcaaaccctggtcctggggtcaggtcaaggtcaggatgtttttccttggcccaggtctagggtctagccaggggccaggtgttttttttctctggccctttttatcctatagtctatatcttgtactatgttttctgtcatggtttgggtgttagacactcacctaagaaaagcagagtaagtcagttgggtgagtgacaaattatgtaggagtgaattgaatatactagtagtaccccttggtagtataaatatttgaagaaaaaagacaaaaacagattatggggtggactcgagagcttattggtggagatgtttggggataagaacattgcaggatcacaataggactgttgataactggaaatgatcattaaatgggttccttgaaaattgatcgcaaagaaaaggaagcaggtaaggtaaatgattagacagacatctgtgtttaaaagtgtccccacaagtgcagtttccagtgttgctcttctgggatgatataacagtaagaggacgaatttttagtgatcaccaacagtattattctgtggtcagagatgtctttagaaaaccagttttgtttgtttgtttgttttgtttttgcttctaagatttgtgtgttaatatttatgtatttacctgcatttgtgttcatatgtgcctgagggtgttggattccctagaactggatttgtgggtggctctgggctaccacttgaaaccggaaatctaggtcctttgcaagaacagaaagaagtatgttgagcctttctttactttcaatttagttttaaaagtttgtatgctttgtgcatgtgtaagggggtcaggggagtcggcaggtagagctggtgactgagcccaggacctagcctatgctaagtcacctcctccacctctgagccacgccaccacctcatttcatatgttaggcttcaaccaaagttgtggtttggggagtcttgtatatttgctagatttctgctaccttaagattatagtattccctttcttttgagactagaatttaatttctgaggacaggatcttggggctgattggcaactgcttctgtcagatgctaatttaatcatttatgtctgtttgttattaacaggacgtccactaacatttgtctttcattttgccctagtttagttcccttagtgcttattttcacatcagctgtctatcaaagtagtccttcctctctaatatccattgtagtttatgaccagaggtacagttagagcactgtcccttgttttcttgtctttgatggtgaagattaagtaaagttcttaaagcacttgatgtagaacatttgatgtgaaacaattctttccaggttcctattcagtagattgttttccaagttccagagcagccatttcctagggtcagttcacttgatcagcactttgccttacactgtggtagaccagatggctcttctctaattggccttacagtatctttctctgtttagttatttaccaagcattatttcaaagtgaagttgcaggtgtctctgcaacttccatggctagcagagtgactgacaatctgcaggaagcaagaagctgatttgattcaacacaactcatttgtcagtgttggtacaaatttctgacccctagtagtttactttaggcatatttaagcgcagcacaatttggtgaaaatatattctggtgataattaactctatatctcatgcacaaaataacatacataaatctctttgaggacaaagtaaactaaatgcagatggatgtgaccaataaagatgagttctatggattgactgagaaaaacaagcttacagtgtggcctagggggaggatccagtgtagtctccagccacacaaatagtacaaaggtcaccaggctattaaccactgtggctctcagccttttgggatgataacagattatgcattccttcctttaaagaaaaaccttgtgtgtttaaaggtcaggttctcctagtgcttatctgtgagtacaaataccttagtgcccccgacaggtgtattgcaggtacagcagagaacaaagcagttctatagagataatttttcatctcacacatagtaatatctcaaatgttcaaaccaggaacacaaagttccctcatgttactgcaatgtttttttgacacctctcccagtaattgattggctggtaagctgtccatagttctttgcatcagtaaatgaaagaagagctcagagtagtctcttctctttcttttctcctttttctttgtgctacgtgtagctaaatctattgtgtgcttactgggggtttcttttattctgcagattttctttcatgtcaagaatctttgtcatctattcaagaagcagtttctaaatagctgatctttttgagtaacaaattttacatgaattgtaatatcattgattcagtaaacctttaaaaaataaatggtgttattcttttctctcagtgaaggtaactgagacttggaaaatctgttgacttgtacaacatctcacaagaacatatgttgggaagtgaaggctctttggtatagtataatcccagtctggaacctctggaaattattttcttaacacataccatagcattaattccatacctaaaggacaaatagaataaaaacagatgagtttggtgtttttggaataacattgtgtgttgcttttcatctggaagacatctaaatgtgatgccagggtattcctaccaactctatacagctgtcatgtcatgtctgcttcctgtaccttgtagcagatgtatgtagtttggttctagctgcatgctgtcttgtaacctcctaggtaaatcagaaccaccgttttggaataaaggtcccattgctggcaactgcaggcctaatgcttcatcaaagctgaatggccaaccttgtttgagttttttgtctcactttctgttttttgaccaagtttatgggttcctgttttgtttttttccttttgattctgacccatcatctctccaggctcaggacttagatgctttctggcttcccttctttgaacctgtaatccaactgcttcccaggtcctctgcaccccaacttcctgtacttttctgcttggcctcctctttttctgggaacagtgtgtaatgaacccgtgcagctagatgatagattcagtgccacatggtctaacctgagctcaccttttctgattttcaccattttatattccatgacatacatattccaggccataggaactgtagggaaaggagatttccctggataactactaaattcgctaatgccagcaatttgactaagttattctgtattagtcattcaccagagtcaagttaaaatcttatttataagactaagacaacagaaggaatgatactgtgtgtagtcaggttcataatgataagtaatgctgttttaatatgccctgctaaatttacattggaacttagttcccaagttttgttaatgatccttgggggtggggcacttagggagtaattaggactagatgagtcaggtgggtgggctcctacctgtttttaagaggggaggtccaggctagcccacttgctctgctttggttcatgatctctgacacagtagtagtatatcaaggagccccttaccaggcactgagcagactggcaccaagattttggacttctcagctgccagacagacccatgagcagataagctaaatgatctgatctgggtggtggtggtggtggtagtgtgtgtgtgtgttttataaatttttaaaaactcaaattattcatctcaccagagataaaataataactttgagttcacattgttatctgcatctatggttttaagtggattcattttgccttctacattctagcatgccgcaggaatctctttagtcccttctcagcagtctatcacaggtgtttctttatgttctttctcccagcagcctgctagtgccatgatagtggctatgggatggtcctctcagtttagagtctgacatccacctactgagtgctgaggtcaaactacttacctaactgtttcctcacctacaagatgagaatgatagtagtttctatcccaataatcttatgatgctgagtagaaataaatttacagcatctcacacagtgcttggtactcaggctggtactgttcacagatccttcttagcaaagggcttctctgttcttccctgttttcaacccaaagatgggttgcctgatgatgctttttacccaatacctggactgttaaatctgagccttcctgctgcctctgtcactgctgtacctccaactggtttcacctcttctgtagggtgtcactagattcttctgctggtctgtttcccttgggccagtccacagtgtttgcagctctgagagtgtatcagcatgcatcactcttctgcctcatatatcactaaagccaatatctttatagtgacctaaaggttctgctaaagccagtggttcttttccagaccacgtggcctcatgaattttgttcccttctaataggtctgttgtgtagctcttagagccctgggttttatggggatcttttagttcacctcctatttaaaccctcaatgctttaaagtctttccctgtgaggtggaatattgctaagcagaaatgcaggtaacaaaagtgtgaacttcttttagtgggattttaaaagttgagagggcattgcacatatgtagacgcatttctgggccgagagcttgaatatctgcattcattctgccatcttgcctgtggagatgcccaaaagctatgtgagttcatttttgaattgttgcaagtcctgccctttcatctgtttgactcatctttcttttgagtgttctctgcagtagtcctgagttcaaggccctgagtgtccctgctttgccttctggtgccctggagatccaaaggctgtaatgagtgtggaaagtgctatgtgggggatggggatgtgaagggcgaaagatggcagaactcacagtctctaatctcctgtttgaatggatgaagccatctcagcaactattttaaattaaaatgtgaatgcaaaaaaagatagatgtggggtggagggacagtgatcatctgggcagattcgttctggcagatgaacgaaaggccttacagggtgaatgtgtgtggacagaagtggggatgggctgttgggagccagagacaaagccccaaagcagggcggcgaggtcctcagtgctgagtggcagtggcgatctcaccagttttagaaacaagtgaattttgctttcacggggcttgtcgaaggattgttaattctgtgaagaaagtgaaaaaggatagggtgaaaagaaacaatgggacttcctccaaggaggtcaactctgaactgaatatgaacagtaggttaaatggcaggtatgttctagaaggcagaatggcaacagtccaggcagagagtcatgggcacagagggcctacctacagtaggacagtttttgcaggtattgggcaaagagctttgggtgctaaagtagaagtctagatgtttctcagggtgggaggtataggggtagacaagggtggacagaggctagggagacttggctctttgaggtcatggtgaaggatgtggaagtgtatgtataataaaattacacagaccagccacctgatggtttcaaaggagggcgttgtgggtggggtctagggtaatcttcaggctgttgtaagtaaatgccataagctagattcttaccagcagcaggttatttctccattctggaggctgaggactagttactcattgtagtcttgtcctcctcacatggtaggagaatgcaagctagctctcttccatcttttaaataaacacttacctcattcctgagggcttggacctcaagatgtcatcattagattttagcctgagtttgtgagacccacaaatactgagaccatagagagtaacaagagatactttgagagcagactgatacaaagaaagtcactgggaatttgggtgaagtggaggtttaagagaagacataagggtgatgagataagtgagacgtaccacactgagtgtttgaaacctggtgacagtgttagatatgtaagtggtttaataaatattgtggttacaaggaaattatcaaaatgttttgtagagttctggtccttaggaaatatcacataaaacatgaaatgaaaaatctgaattaagtagcttatggtttgttttgttttttgagtcagattttctctgtgtaacagcccaggttgtcgtggaacttgctttgtagaccaggctggcctggaactcacagagatccacctgtctctgccttccctagtactaagattaaaggtatgcaccattaccacctggctaaagcataatagaatcttaacttacatgtgggtactcagaatgagattccttacacaagattaagtaccttttgtcttacgtaattatactccagtttagactccttgagactgagttttgccttctgtgaaataggaatcatagtcctgcatggggcctgaagaaatggttccatggtggagagcacatgcagaggacttgagtttgattcttagcacccacagcaggtggctcacaaccacttgtaattctggttccaggggatctgacacccccttctggccaccctgggcaacaggcacacatgcagtgcttatgtgtatattcacacatacatataaagtaaaaataaacaaaacaaagtaaatggcacaaagcttgaagtcataagggagaaatctgacaaaactccccacttttttaggcaacttttgacctcttctaatcaagaaaaatggtaagttacaataagcattgtgatactcattcttacctctgttctgtagcctgtctgtttattgctagcccatttccctgatgcactaagaaggaagacagtgccttgtcctctctctctctctcttttttttttttctgacaaagaagcagatttcacaggaaatttatggaaatgatggaggtcaccaaaaaagtcttctttaaaagtaaagctagctagcatagcacatgaggtgctgctgtggcctggtggtaagttcccacggattgcacgctggaatcaccgagcagagacctggggtgcacaggaaccttaagctctgcccacgacggctcgcatcaccttgtacatcttcttcctggtttaccgcctttaagttgtgagtttgttgcttgattcactgctttgtgtatggatctatttgtttctaaaagccaggaacttccaggaagatttaggtgatgaagtttatgggttataaacaaatggaaagattataaaacagcactaaatctgggtgtcaaaatagtcattatctataattttataatttctttttttgttttgttttgtttcattttggttttggttttcgagacagggtttctctgtgtagccttgactgtcctagaagtcattctggagaccaggctggcctcaaactcatagagatctccctgcctctgcctccccgagttctgggattaaacatatgccaccactgcccagtttataatttctttaaatgtgtcggtctttaagagtttggggaatagagttatttaattttgagccaagtaccagtgggtgtgctggcattgtctacaatctcagcactttgatgatggaagaaagagggccaagagttgacagccactcttagctacacaaggattttgaaaccaacctgggatacatgaacccctttcggggaggagggttgacaatagaggcaagtagcatactaccaaataatgtttttctgttaatatactgctttgggcagcccaaatactactctatagccaagagttgtggatgtcctgccactatgaattcatagaaagagacaatttgtggaggcaaaacacttgccagtatttaattgcactttatagtctattcatttccttggccatttttcctgtagacttttaaacctttgtactaaatgccagaaacattataatactgctgttttcagcctggtggttaaatcacgtgattctaagtcctagttccttttaaaatcagggatgttctaaagttcactgggggccttggaccatggcccagatacagtatttgcttgtattccaaggctctgagctcaactacctaccccaatctctgcccatacaaagctttataaatcacctgtactggaaacaacatgctttttcagcaagtcttaactgtatatagaatattaacaattttactcgtattttcttataagcaaatttggcaggtacaatattctagaggtcagaggagtagtaatgagcctggtgtgcaaaacaagagtggaaaactacttctctgttagcagatacagtctgtggaatgataatcactgcagagtgtgagcagatggaacagactttggaacatgaaaggcatgtgtctgggcatttgatgaacaccctgggatttggggaattatatccaacatctaacttctcgagatttgcttagtctctagtaaagttccatggacattccctctatgattctttttctttttaaaaacaattattttgaaattattaattacatcatttcacccttccctccctctagattctttcatgtactccccctttcttgttctttcaaactcataaccttttttgccattaattgttgttatacacacatatgtattccaaagttcataaatacaacctacctagtctatataatgttacttgtatgtatgttcacagggatgaccatttggtattggataatcagttggtatgcttgtccctgagaaggactgtttctcctgctcccggcgttccttagtcgcctgtagttccttgtgtagttcatgaagggttgcggcttcaggatcttccccatctgttggcgtcattcttgtccagcttgtgtttaggcagtcacatagatgagactttatgggtgtaccttctgacatctgtaggaggcacaatttcacaacaaattccctggtcctctgctcttacaatctttctgctccttcttcttcaatgttccttgagccttacattctgggattgtttagttaggactgggctccaaaactctttgttttgttgttgttgttgtatctttaagataagtcatatctcttaaaacctttgacaaagaattctaagtgtgtggaattcttgaatttgggaaaggaatgcctttgtacattagaagtatatacaattttttgaaatgtaaatactttgctttttaatattacagtgtgaccaccctatctcaaactgttcttttcacactggcacttcctttttggtattcttgactaatacctgtagaccatagttttcacttgtattgtggttttcattaaacttgaaaccagaggcacacacctctctgagacagctttctataggataaattcttaccactgggagagatatgaacaggtaaatatgagaaaacagttagagccagctctcatacgacagttctgagccagcttttgaaatacagataagacagaatacccacccatctttagtaaatctggaactaacttgtatgaactgtgtgtatgctggtgatatgctgttggagtagtagaaagttgttttgggaatatatatatatatatatatatatatatatatatatattatatatatatgtgtgtgtgtgtatgtatatatatatgtgtgtgtatgtgtgtgtttgtatgtatatatgtatatatatgtgtgtgtgtatgtatatatgtatatatgtgtgtgtatacatatatgtgtgtgtatatatatgtatatatatatgtgtgtgtgtgtatgtgtgtgtatgtatatatgtatatgtgtgtgtgtgtgtgtatgtatgtatgtatgtatgtatataaaatcacaggtagtgggtcactttattcctcttagtaaaacaatgattagaatgagacaaaatttcatttggtttctacacttctttggcatacctgtcacgagcataaatagatacagttcacaatggtagagcaaccacatgttggctattctaaaggaaaacctgtccagtgttccaaaattttcctttttatgaaattatatttgcccaggccaagaaaaacttgaactcctcaagcctgaagatgtgatgtgagccacaggatgggattctaacttatggctgaatgggagaaagtgaaggttctaggttctaggtgtacattaatgaggtcaggtccaagaaccagatgaaatttggtgctagaattcataggattctatatatacgtatattcatcccactcattataaactaatggctgtttcttgtccttgtttctattttgtagctctatattgggggtttccagatagtacttccagagttgttatccctgttttccttattaggaaaaggaggaaagatgttgtgtccgaggcagcaaagcagtgaggagcagtggcagggttggactctgccttccatagttcttctcttgaccccatgagttcttgatgcctgctgcttgactcctggaacagcagaaacaattacagtttccatgctcatgtcattcttagcaccttgaccttttggacaaagagacactgaacatttaaatgtcacatggctcagactgctctgagtgagatctgtttgtccattaattgaacgtcaactccgatttaagaaccataaagcctatagtatgtagcagtgtaggtcagtatgattcttttcgcacagttaatgatttaaaaaaaaataaataaagcacagccgactgtattctcaagctcctccccatctagattttttttgccattgatacttgtaccactctggtttcaagctcttgagtaggtttctgggtttgttttgttgggtctttgaaaactttaagtaaacgaagctgcggaacttcttgactgagaatctgccctgtttttccctttttctaggtctattattagcagaagatttttctgcatagttggcacgctgtacctgtatcggtgtattacaatgtatgtaactacactcccagtacctggcatgcatttcaactgttctccgaaggtaaattgttcctccctgtcattttccctttttgtttgtttcgcctcttgccctggggaccttagactaaggtcaagatgaaaatttagtcagaatcattttcatctgggaatgtccctaaactatagggccagacagacacacccttctccgaattcccgagccttgccagcccctcccagttcggaacgaatgtgtctagtgagtgtgctgcaagctttctgtgggggtagagttctttgcttcctgccaggctattaaatgtgttctttggtgccgatctggaagccttcatatgtgttcccctccactgtgacagaaagctgtttcttgtggcacatttccctttctctgtcttcccatcattcctctcagcagatccaggcacgcgcactcctgtccccggcaggcctctgctagttcgtatgagacagttgttgggaagaacgtggggctgtggatctgctaccttttcttgtatcccagagaattttgaacctgccctatatccctcccttagtgtctctgcctctgcaccacattcaaataaccattactttagaagagcttttaactagaaaatcctttggaatgtcatcaaataggaaaagacttaattctttaatacatcaaagctctttagtgcagtaaggaaaaaaggaggctaagttctgccttgatttcttgattattattttaaacacacacacacacacacacacacacacacacacacacacacacacacacacttatatataatactatactttgagatcatttatctaaattgaactgtgtgccaaaatagccggttgcctttggtcccatcccttcctttctaagtctcttcctgccaaaggagacatcttctcagtgaagcttcggaaagggccctgcagcgttcactctggattttttaatgctgtcttcatgatagagagctctggatccttttagtttctgtgtgcactttgtcccttcccagactcagccgacatccccacagaggtgactggttactttcctgactctgtgcaaggcttgctgagctctgggaaatgaattccaagcatcgcactctatcagcactcctacttctctgtaccctctcttgctggtcctcggacctccctgggaagccagcctcacatcttgtgaatgcttcccagaacccacttgcagtacccagatttcagaattcattaattcatttgtttattttatatttggaaatacctcattattgagagttcagcaacacttgttgagagtgtggttgatagggaatgctctatactgtaaactgacaattgtgacacacgccaagtgcagttcaactcttaatagagttatattggtcaagttgctgcaaagaagtaggtagatgtggattgagtatgtctatatctaggggccatttttcccgttcctggttctagtgttgtggttttgtgaacgtgtctgcatttccaatcagctcttcaagtccagagttggcgagctgtggtttattggctcagccagagacatcagtgtacctaatcacaatccatggctaagaatagctctcaggttttgatggtaaggcagaaatagcagacacgccacagcaactaactcagatatgtcccccatgtgttggccagaaatccagtggtgccatgatcctatctcagtcttctaaaactcagaatattaaaaacgaatatttgaaggcgtatcactgcatcttagtacacagtagtaaaaacagtctattttgtagaataagaacaaattctgcacaaagctcttttaatacaggatttcatgtagcccaggggatgcaacttttcattttgatctggaattttcaaatgtatttcagtgtagagagactagtgaaaggaaatctgttacacccaacatgcgggttcacttgttatcgttatcacttgttatttttggttcatctgtctgccctttttatttgaaagtattttaaaacaaatatcagtgtcagccactatatcactacagttgtggcatgtactagaaaactagatatttcatgacataggcattatactcttggtggtcaacaaaattaataattctttggtatcgacaatatcggttcatggactatcctgtttgtcttgggggcattttgctggtttgtttgcatttactaggctccagagtctttccacatttgccttgtctgcctgccagactctttcttccagtcagtgcagtgtagggctcagatcataggtcctgagctctatccatattcacatttttaattgactcatcagtttctttgtgatgtcagttcacttgttcccctctcctccatacttgctctcagtgggaagctgtctttggagacttgtctaggttcacttttagcatacttagcaggaactcttcttggagagaacattaagctgtctgaatccagactgaagaactgaaaaggactctcaggtggtgaactgagcttgagacttactgttctgccacttgctggattgccccgttatgggccagtgtcaacagggagagaagggtgacacttgagaggtctcagagaccagctctgcccattttagagtccaaaaaagaaccttgttaaatgtcacttgtcaagacatctttaccactgtgtcagcctctaagccaaaagtctacaggaagcagaaagaatcctgggttgcaactggcctgctaggcatgtggcagatgaaagtttatggacaaatcaaagtaatagtgtctttgatgtgatctgaaggagttgtgagtgtgagaaaaggcagtgtcactaaaattcttcaagaagcaaaggacttggtattgtcctgctcatccactgagaactggacaatttgcattaagcaaccactatgctttatgagctcaggtacaagggatgggccaggtagagatatactttgttgaaaacaccttaaaattttcctggctcaggattgtcccttatgggacaagtttgaagttttgagatgataccataaaaggatcaagataagccactaaccccaaagatggaaaacaccacacagattagagcagtgtttaagggatcaaatggcaataattagaaggaatgaagagggaagggaaagatttcaatgactgggttttatcaatgggataattataagtggaaaagaaaggggttaatgactttgggaagaatacaagtacttgtgagacagctaaatgacatctgtgatgcttaggtttgtagtctcaagttgaagtgaaaaccagggctagaacattactgtttgtgattgatcatattatattctgaatggtagtaaaagctatgaaatatagatgaaaagtccataagaagaacatagaatctttaatgctcatacatagaattggatgttcagcatctgaggtcactttagttctgtttattggtaggttctcttagagcagtcacctatcactaaacagttggaagacaacttagctttacattagagctctgctgtgtgaggaacttaaacacatttaccccatattagaatatcagtataaattagtatagctaatactttcctcagcatcagaacgcaaaatggacagcttgtaagaaagttgctgcaacagatctctgatagtaatgatagaaattggtctcaccagagcatgagagctttagaagtagtcatgaggtggcaggtcagcggcggcacaggcctcccacccgatgttgctgcaaacactgataagtcactgggaacatggaaaaggaagtagatgtgttcacttcctggattgcaaataacaaaccaccttcctgtgcccctggggtgcatgggtgccaggcctatgctggaggctgccaagtgtttgataccttgactggcctctggcaatgttgccagagcttttccccaagagcatgtgtggatccccagcctctcttctgctgtcaaaattgtttttaatgatgttgctcagaatggtttccttccagatgatgattgaggagctaatttaaaaaaaaaaaatggtgccaggtaccacaagagtaacagaactgtgctgttttctgggattttgttttttactttgttgttgtttgttgttgttgttgttgttgttttaatggagtgtgctggatatctctacaattttgttcaaatgactgcagaacctggaaaagctgttgctgctattgatgcataacatattgctattattggtctttttatataaatataaatatatatatatacacacatataatttgaatttttggaaactttagctgtgctgtcaactttggaaaaaagtatcccagtttaccgtgttgcgttggcatagtacagaaattaacagccatattggtctagaaatgttgaacttaattttttccatttgtacagtggtaacacactgtattaaatatgtaaggtcttatctatgtgggtttgattacaaaaactaataaagtattctctaaattaaaaaaaaactgtttagaattgaaaacaaatgaaaacaggaacagttgataacctttgattttagacaagtttgtacttttctaaataagagagaaaggaaggaaggaaaagaaagaaagaagaaaggaaagaaagaaagcacctgttatgctcgcttccccagatttgcacacacagtcccatgctaacttttggaaatgttgatgtggtggtgactcagcattaacctgagctacacaatggttctgttgtggtttctgtggtgacgttagatttcagagaggagatgacacctcagccagggcacttggcaaatgaatttcatttgaatttttattcaggccccccaataaacagtttactgtcagacaaggaccatgtctgattgtgagacagctgtggggaaaccctccacagttgtctctgatgctgtcaacttgtcttcatgggagatttcagaatcaaagctcctccatgaactcactggcctcatgagccccttgccttgtacaatgctctgtggcagttatactcccttctcaggtggcagttggggcatttcataagccctccgcactgacacactttggtagtctgattagcccctgccagcattctgaggactacgaaagagctgcttccattatcaaagtaacctagtgtcatagtgttacatcatgtggggcttaagttatcagtgcttgattttgcccaaccctctgtatacttccagtttcctattgtcagtaaaatttcccttttgtttgttctcattttttctgtttcttgcatgtaattttcattagcatataccatcctaaaattttttctcttacctctctgttgctgttcattctttttttgttttgtttttagggacaacaatgataacaatgtactatatcatttcttgtttaaaaattacttttttgttgtttttgttttctaagacagggtttctctgtgtaaccaccctggctgtcctggaactagctctgtagagcatgctagtcgtgaactctgagatccacctgtctctgcttcctgagtgctgggattaaagttgtgtgccaccatcacctggctaaaaattacttctgttgcaaataaattttattatagacacactagaagtatacagcaaaggggattttttttaactttatatttcaatacgttggtcctctgtggttattcttcttacaagtccaactctgctgtctgcacatagagctcttgttacagcttatatttgacaagtgcattttgcaatattttgtagattctcagctcctctggggtttccttactgaggggagtacatcactcactcagattgcaagaaaatgaagattgctgatgtttttgcagttgactcgtacaagttatttccatgagcaaacatctctggagaacttgtcatgggctgacataatgttgaatattaagggcacaaatgtacctagcaagggtcctatctacccctgtcctctctctagagctgagagtcttcagagccaggagcccccgtgtgatccatcaggtggctgcctggcttgttcactcctccctgtgtgggtatggtggtcccacctgccttggatgcacaggaaagcagccattgtgctgggcatgcaggctgcgctgctggaggtgtgtctgaatcaaggttccgaaggacaagttggagtctgccaaagtggaaacctagagaagaagggtagaaaggaccatgcaaaggaatttagaataacttgaggtttcgtgagcacaggtgtcgggtcctctggtctcaggggcatgagatgaagtgagacacgtaggctgtgggcaaattttaaaggacctgacacccttgtaatgagttatgacttcaagggccataggaagcctagaaaggttttagtaggggtttattatgtacccacaattatcttttagaaatgcatctccctggtcatatagtagggttgggagagagggagatagactttgattggtgccaaattatgtatctctttttcatgccagctgtggttccagatgctttattttcatgtaatgctaaaaacatggagtagaggaagctgcagtcagttcagaggtatttggctttgcctcgtgtttcagagctgctgcaggacatctggtcacgtgtcggttgtcgatgatgctttttcatggttgtgtgaattagtgatgaggaatacctagaccgaactggtgtgccagcattgagggagacactggggaagcaagggaagccttacagatattaagagccatcaactgtcttgaggcaaggtattaaccgaggagttccagacagccttagaggtgactgtgtgtgcctcaagggaagccttgcccactggctcaggagcaggaaagtgggcaatggcactttgactttagggagttgtcttggagctacccggccacgagaggtcaatgatcactcttaaaaaaaaaaaaacaaaaaaaaaacaaaaaaaacaggctgttctgcttgggaactctcctctgtcctgttttgttttgtcaagctttgtttcttgttttgcaatgctgggacttgagcccggtccctgtcacctgcccctctcactgagctgtagcctcgtccttttgggttatgcttgagacagtttgagcatcaaagtgtcagattgcaataaatcaaaaggaactttttataacttgaggggcgctttagaaaaaaattaataaatgtaaaagaaatagaaaatggcatttttgtagccattacagaaatagttcaaaaattataatccataatgggtggtactagaagccattgggtgaaggttgaggccagtagtatttaaacaatttttcaaaatcacatttcttattaattataaagaggcaaagataacatatttagtagagaagtctagcaggcattgccatggccagatggccataccaatagccggacaaatggcaccagggcttcctcacaggtgcactggaatggagaccacagccattccgtttattctgccagcagcaattaatttgaatttaagcagactgcagcatttagagaaagtccaaggaaggagatgtatgactatcactggtggagaaaagcaaaacagaagaactgtagtggatgtgaaaagcatgagcatggcagggcacctcagagctggtcctcgagttgatactacatcagtagggaagggatccagagatgatgtcagggccattgagtggtctgaagagactatgaactgtggttggggttggatcattgtagatttcatgagcatggtcacacgtgagaacttcttgttttggattttggagtgaggtgtcataaaatgtcccttacatgacacaagggaaacgagagaaaagagaagcaaatgtggtgaaatactggcagttaatgaaccagaatggcgggcttcgttgttcattattctctattcactattctctccatgtaaagatttttaaaaggaagtgtattgtgtaaactccacttcctaactggcttgacgagaggaacttgaacactcctacccccctcccccccaatttagagcgatgtaattttattaaagggacagtttgctttaaacactggagtgtaacaaatccagagctgatccaagtcagtttttatgaggcctttggatagcgtctttattaaaggctgtgaaaaatgaacatttttggctggcgtaaaaagaggctggtggtggattagtgtcttagacctccacccaccctgaagcctgcttaatgtaggaattgatgcaaacatttgagaatggagaagggccaaaccctccatagccaaggggaagaacgagtggtagaagctgcgtaggagaaggggcatgagaagtctctcctgctggtaagtctggtgggtgcagtcgtgtttgtggaggaaagcatgtctctccagaaccggaagagtccagaagagtcttgagtgaaatcatgaggatccagcagggctgcagattcatggagagccatctccattttatctgctgtctcttagagaaaaaattgcctcaacttgataatagtaaatgctgccttcaatttctgtaataccagcagtcactttgaaaacaaatagtacctgaggctagaacaggtgaaattcttccttcttggttaactgctgttggacacatgaagttgatagggaaaagcaaggaggagtgcagggaagagaatggagtattgattggatccaaacacattgtgcgtgcgtgcgtgcgtgtgtgtgtgtgtatgaatatttagtaaaattgtgggggcactttcaagacatgatttatctgtgtgtcccttgactgttccgggactcactgcatagaccaatctggccttgaactcagagaatccacctgcctcttcctcccaagtgctggagctaaagatgggtgccaccacacccagcttaaataaagtatttaaaatagggtttgagttgggtttgtgctcatttttgttcctataaaatgtatctggggagccagtgagatggtttagcatctgctgtcaacctgagttcaatcctctcaccagcgtaaaggtggaaggaaagaacctactctacaaagttgtcatctagcctctatgtgtgtgccatggcacactcatgcacagcccccccccacacacacacaaatataccaaataaataataaagtatatttgtaagcaagacatgatggtgcatacctgtaaccccagccctagggaaggtcatgagtttgaggctagtctggactacatgatgagaatccccccccccccccgacacacacacacacacacacacacacacacacacacacacacacttctcttggagaccaatgtagcataatacaaagcaaggggagcctgaatagggttaatagtacctggtttcagatggcatgggaatggaaaaaggtaaaattggttaaattttactagaacagcaacaaagtatgaacctggaaaatgctgcccccttgctgtttcaggaggtgcttacagccatagcgtgctctctctgggagcctgagtagaggattctttgtatttggctcctagattctgatcctgagtcagtatgtaaagagaatgtagtgttttattctgtaaacccaccccaccacttcttttttactgcacagctaggagatggtaaagcaaagcaaggagaaagcagaaagggcagctttcagcaacttcttcctgctgaggaatatacccttcctgttgttattttactttccctgtggggccttaaagagcatttcataatttctttacttggcttgtaactttccattcttgtgtttagaaggctgcctgccagttaaaactcagggaatggaatgcttacaatcatttgtgcagttgactgagtgagctctcagagcacatggctttcttggtggcaggatgctcaaggcaggagtccaccagctctgtttctgtccctgccatgtgatcccttagctgccctgctgttggtctgggtatttaagaagcatctttcagggacatatgatcaataatagtgcatttcctatattggaggaagactgttatttaggatcaatacactgtaatttgccagcgtaggttgattccatgggtgaatgattgaatggcattttcataaggggtccttggcagaccagggtgattggaatgtgacactgatagtgtgctcatacttgttactccctgtggatcaaactttgagggactagcatggcagttggcaaggtgctttgctaacagtgtagtcgtgcattgttttttgacaaggatgcttttaggtgtatgccatcaaacttcatccttctgaaaactccatgcccctgaggtttagcctgtgccttctaggctgcaaaactagccttatagcatgtgactgtgttgaacattaaacccaatttctgtatttatatgtctagtcataaaaagatatgaagtaaaagatttacagaggttcagctcagggcagtcaccatgaatgaagctttctgggttgtaggttgctctgggtgggccaaggattgtgtgaagtccttggacatgactatgtgctactgacggtgtgatctaatagacactgagcacttaggctgtgctacactcataatgactgtttcccttgggtaataatactgtaactctttataaacttttgattttagtattcttttgtaaagataccttaaaatacattgtaaaacaaatatattataaaaaaggcataaaaacaaaaatattttcttaattcacacattagcctaggtctatagcagatcacctataaacagggtccccatcactgcacacagggtcccctcccccatcactatacacagggtcccctccccaatcactatacacagggtcccctcccccatcactatacacagggtcccctcccccatcactatacacagggtcccctcccccatcactgcacacagggtcccctcccccatcactgcacacagggtcccctcccccatcactgcacacagggtcccctcccccatcactatacacagggtcccctcccccatcactatacacagggtcccctccctcatcactgcacacagggtcccctcccccatcactatacacagggtcccctcccccatcactatacacagggtcccctcccccatcactatacacagggtcccctccctcatcactatacacagggtcccctccccatcactgcacacagggtcccctcccccatcactatacacagggtcccctccccatcactatacacagggtcccctcccccatcactatacacagggtcccctcccccatcactatacacagggtcccctcccccatcactgcacacagggtcccctcccccatcactgcacacagggtcccctcccccatcactgcacacagggtcccctcccccatcactatacacagggtcccctcccccatcactatacacagggtcccctccctcatcactatacacagggtcccctccccatcactgcacacagggtcccctcccccatcactgcacacagggtcccctccctcatcactatacacagggtcccctccctcatcactgcacacagggtcccctcccccatcactatacacagggtcccctccctcatcactgcacacagggtcccctcccccatcactatacacagggtcccctcccccatcactatacacagggtcccctcccccatcactatacacagggtcccctcccccatcactatacacagggtcccctcccccatcactatacacagggtcccctcccccatcactatacacagggtcccctcccccatcactatacacagggtcccctcccccatcactatacacagggtcccctcccccatcactatacacagggtcccctcccccatcactatacacagggtcccctccccatcactgcacacagggtcccctcccccatcactatacacagggtcccctcccccactcacagggtcccctcccccatcactatacacagggtcccctcccccatcactatacacagggtcccctcccccatcactatacacagggtcccctcccccatcactatacacagggtcccctcccccatcactatacacagggtcccctcccccatcactatacacagggtcccctcccccatcactatacacagggtcccctcccccatcactatacacagggtcccctcccccatcactatacacagggtcccctcccccatcactacacagggtcccctcccccatcactatacacagggtcccctcccccatcactatacacagggtcccctcccccatcactgcacacagggtcccctcccccatcactatacacagggtcccctcccccatcactatacacagggtcccctcccccatcactatacacagggtcccctccccatcactatacacagggtcccctcccccatcactatacacagggtcccctccccatcactatacacagggtccccttatcacatcttggtctactggaaggctgtttacggattgaactgatgtctcctacacttaacctttttgtctgctaaacttggtgttagaagtaatgatctcctgaccccagccccatttctggctcctttttcctatttccatttaactcttaaccagatcaccatatctgtggctcttttgcatatttttactttaattattatctctaagtgatgtgagaatatcatttctctttttgtaattcttgggttttgttgtttgggttttttttttttcttcattattatcttacctcagcttcccaagtgttcagattccaggcaactataggtgattacctcatctgcctataattttttacttgttttgggagacagggtgtcatggtaggctgtcctaaaactagccaagaatgcccttgacctctgatgctctgttaactttctgtggtaaaaaaaggagggcttcccaccccctgtacctttttcctcccttcaccctgccatccccaggacatagagtcctgtcttccttctgtagctgtctgtcctctgtgtaactctgtagtcagcacttacccaattacagatctgtaagcacacttcacagccagaccttgtcactttcctgtaatagcctgtgagttgtgaccttttttgggggggagggttgactctttacaggggttacctaagaccatcggaaaacaaatgtatttacattgtgatttataacagtagcaaaattagttatgaagtaacaataaaaataattttatgtttggggttaccacaacattaggaactatattaaagggtcacattaggaaggttgaaaaccacttgctgtaatcatctttccttttctgtacagtagtttgtttcccacagagtggataattaattgccttgtgttttgtttttagtagttttctatgtatttatttatcttcaacgtatgccttatagttaaaagccttggctaacccatcggtctcgtgcccttgaagacctcagtacgcatctagactgatcactttgttgagtcagtattacagctgccacagagctctgtggctctcccttcattgccatcctagaaagtcctggctcttactttcattgagttttctcacttgctttgcagaatgcatcctctgcagacatggcaaatgctctaaagtcatgtgtatataaaaaaaggtttagttgcatggctaggtccagaatctaaattggaaatcatattgcttactaatttgaagcccttccccaagcagtctctttttgtggaatgttctctcaaagtcatattcatatggatccttcatctaaagcttggttttcatctctggggacttgggcatggctgtacccagttctgaagtgttgagacctggaatctttcagtggccgtctgctcccttctcttgtgctgagcattcaaagctccctttccgctaggagggtcagatcctctgtgtggtctggcagctggctttcctgaagtagaaatcctgattgctttctggaaagggaaagggtaaggaaacattttccaaagctggggcactagcaattaaatgttgaaaggggatcatggtaattaaattggccaactagaatgtaaaaggatgttgaaggtgatgaagaggtggctcagtggttaagagcatttatggctcttacagagcaccaggtttgaccttcctcccccacccacatggtggctcacaaccagctataactgctattccagagggccctcttctgcaccaggcacacacttggttacacacatatacatgcaagtgaaacatccatgcacataaaataaataagtctaagaaaacagaaaacaaaaggggtgctgcagtcatacatgcagagacattttcatgtctttgatggagcaaacacaagttgcatcaagtgagttatttcagctgtttactatttgagtatccagcccagacttgcatcttaggcagcaaggttatgttatcaacttctctcccactcttactaaaaggaaaagtagctgctgttgcccgtgtaatttcagagggctgaaaatacatcattttcagtcccttgtttcacaaatttgactgactgcctccaattgctttggccaataaatcagaactgttatcctttgggtaaaaaatgcatctctaaatgttcgcttaaggttcatgccactaaggtaaaccaaactctaattctttctgtttcattgtattaaaattaagttggatggaggcacatggcttagtggtacagcacctgcctggtgtgcttgaggcccagggttaaaatcccaaacctccaacgtcactgcaatgtactatcgggaaatgccaggatccgagagaggttctagagccagatatgtcatccctagtactgtacactttccatatgatgaacagtgcatgtgtacatgatgaagattggatgtgttttgataagcaaatagaatgatagcaaagattctctcaaactaatgatgactctcactttctcctttccaatagctctttggagactgggaagctcaagtgcggagaataatgaagctcattgctggaggtggcttgtccatcacaggctctcacaacatgtgtggggactatctatacagtggccacacggtcatgctaacgctcacctatttatttatcaaagagtgtaagtctacaacagccttgtttcgtaatttcctcacctgccactccccatggtcctttggaaagtcagtgtgggggaaatcccctaaagccagactggaggcctgaggacagttgccttatcttattatccctgtgcaccccgcaaatgtgtggaaagcccttagctgcaactcttgtgtgtgtgggtgggttccttgttcctggacatcagctgtaatgtttggccagtctttaatatgtgtcatcatttacatatgtttatatgtatatatgtatttgagtgtttgtatatgtatgtgtatatgtgtgcatttgtatatgtatttgcatatatatatgtgtatatatatatatatacatacatacacacataaatatgttctgccactttttactttccagattgttttgggcacatgaggcttggttcattcattttaattgctgttagggtttaagccctataattgaacaacagatgctttatttctctggaaaattgagtttcccttaaaattttcctgtcagaagccactcagtgagcactctctaggcagtttccctgaagagtgataaaggaaatataggcttcagtggtcccgcagagataggacacaacagcacactctggaaatgtcctagaaaatgtcccagcccttgaaagtgtgtgctgggagctgagagtataaatggatgagtagcaacgatcagagggtaccccaagcctcagagcggagtgggtgggagacaaaagcaccctgcaggagctttcaagaggaattggagagaacagactagaaaccaagagacaagtcattgacttctgttgtggttgtgcttagcaggtgtgactggacttgtccgtcacccgtgggagaagtggaaggcatggaagaggatggcgagcacagatagcccaggtggtggggaaggaggaggaggaagcaggccggcagtcctgtccttgaagcagaagtaaaaggagggaggtgttctgccggggacctgactgtgcgaacaagtgaactaaatagagaaacgctgtaagggcatctggccctcataccacaatagaaccaagtatagaaaatgggaaccttagggagaaaggggtccctgtcccctactgtttgacatctgaagtaacttttcatgttaaaatttgtactggaccataagcaccatactatattggccttgcaagaatcacagaactcttaatttgggatcctggaactatcagcccccagcattgtgaccctgggaaaaactctaacatccatgtgtctttgtctcctcatttttaaaatgagtttttattgcctgagtggggaaggggttatgtttagtaactgctattgctacatcattaaggtatcaagtatgaatattaggggcctagtcctgcccccatcacccaacttcagattgcaacaacaccaaacatatcaaagaagaaagaaaacccttttccccccctctccttcagatcccctcattcttgttccacctttagtacaacacgctactctataattagtctcttcctccccttctcccctccgtcctctccccactcttcatgttggcccaggcatctggagcactgccagtctctgggcatggtgggtgcacactgcctgaatgggtgactgttggaccccttgagaatccagtaagaacagcagacttcttcccggaaatgggggcagtagatccatccattcaaacttttctctggactcccgggctctctagccccctacccgctgagaatgtgaaatagaaagccatacctgtactgacgaagggctgtctcaactgccttcccaaatctgggcacaaacaagtatttgtttggcaaagtcctgtctttaggaagatgtttggactacaaattccaggcatgcgttcttatgtttatatttaagaaacagggacctcatagtctttcagataagtgtgtagttacagaacctggaaggcaggttagcagccgtaacgatcataattgcttgatccgtgtctaagcctctgtgtcacaaatgtgagctgaacaaggatgacaccactgagcatgtcagactggatggggaaaagaccatgaggcctcaactctacacacagaactctaggcaactgagcagagctgggaacatgagaggtggccctccccagggaagagcatagcaattgattgtccagtgtcaaatgatccaccctgaaaatatacatacacgtaatattacatggcatactcagcaggttatgtttatcaatatatgtgcatatacaaacacatatgtatgcaataacagccagtggggaaaaaaaggccatgaacttggagagtggggaggggcatatgggaggatttggagggaggaaagaaaagagagaaatgtaattaaattatactctcaaaaattaaatttaatgaatgcatctgtgacacattaggtgttgggtttatattaagcattcactccagttaatctccaggtaaatttaatgaatggtcattagacaggtcttggggagacagctcagtgggtatagtgcttgaggtatgagcatgagaataccaggtaagcatggcactgtacttgaaatcccagagctggtgtggacaaaacgggttcctgggagcaagctgagtagctagactagctggaccggtgacatttggtggtttcatattgagagaccatccctcagtacatggcttttacatatgaggcacacaaacaccgacatacatgtgtgactatacatgcatacacataccacacatacacacttaaaaaatgtcagtagacagtctttaaaagtagccggtgatggtggcacacgcctttaatcccagtactcaggaggcaaaggcaggcggacctctatgagttcgaggttaacctggtattcagagtgagttctaggacagccagagctacagagagaaaccctgtcttgggcagggcaggggggaatggtaaaacaaaaataaagtgcaatgcagtaactgagcatatttggccatggccacctttccttttttaaaaatttatttttattttatgtacactggtgttttgccagcaggcatgtctgtgtgagaatgtcagatcatggagatacagagagttctgagctgtatatgggtactaggatttgaacccaggtccttttgaaaagcagttagtgcccttaaccactgagctatctctccagcacccatagctaccttttaagttctatttctgattatataaagcaagttatagccctatatgaattactgctgctagtcacatcacccatgaaaagctgtttccatctagccatggttatagagaaataaagtcttttggtttgctggcccaggcttttaggaggaaagctgtaagacagttggtcttgggaatggtgggggcgtggctgagtgctcttcatggtatttgaaaatgggattattgcacatttttcctctttctagattccccgaggcgactctggtggtaccactggatttgctggctccttagcgtcgttggaatcttctgtattctcttagcgcatgaccactacactgtggacgtggtggtggcctactacatcaccacaaggctcttctggtggtatcacacaatggccaatcagcaagtgagtcccccctcgtgcccctggcttgttgctgcctgcttaggctggagtgagaggcattggaaaggaaaagaacctgtggatattttccagtttctcctccttaggagtagccaacttagatggtaccgacatttatattatctatcctctgcagaatcaattctgtaacgtgttaatgtaatgacatattacttccttctgaaatacagactctcactgtctatgaaaaaaaaattctctaagcctgtgtctgcactttgctagatattccttcctaacccccttttgttatgatgggcccctccccagtttcatagttacacttaattaagtttttcccttattataagcctaggagagaaaggaaaagactgagctatttaataggcaagaattgggggcatctctgcttccctcctcgttctgctggaatcttatgcgttcagggtatagtatggtgagctaagggtgaatgaagctgggctatgtggggtgtgtaggacaagtctgggatcctttgaaattagacatggaaaatgtttttaattgcaagattggggaccagtctgtccgggagtgtttgaattttaacatgggaactattttaaatgaaagatagtaagataaacaatgtgtatgttctttgctttcttaggtgctgaaggaagcttcccagatgaacctcctggccagggtgtggtggtacaggccatttcagtactttgaaaagaatgtccaaggaattgtacctcgatcttaccattggcccttcccctggccagtagtccaccttggtaggcaagttaaatatagccggttggtaaacgacacataacagctctacaaagtaggggaatgaggaactgtccgaagtgctaagaactccatgagagaagatgccataaataaacacctccctactgctattatctttcaacagttaccttgacttaacctattgagttacctggtcagcactgtgatcttttttttttttttctctctccaaaggacctgcgttggacaccaataaagaaaatttaccttatcatgcactgtacacatttcctgttgttaaacctggggcttctctaaccagcagccaccgtgttcctctgtgtaatccagcagcaccactgtgcgcttccatatcataagctctggcctttccagccacatctggaagtaaagtgtgttattttcttgggaaaacatacttttcatatctcttgccccaaagacagggctgtaagccattttctagcaaatgtctctatgaagggttctaagtgtctgtgtggggtttggttcagaaatctctgcctgctgcactgaagatggtaggtgtggagaggtctgctcacttgggggttttataaaatcagcagagatggtgtatcaaaaactgaaaaaaaaagattctgttataaagtgatttttctaagtatttcctaactttatttttcaaaatgatgttgtgaaaaccaaatttaaagatttttacatgtcacagaagagttaaaatttaaaaatgcttcttgggagagaaatttgtctatgtttctagtgcctttcttgtcttgattgtatggtcggtaggcaatcttaaatgtttttatttaaaataaagtattccatgaaaatataaatgtatgtatacactactaaattttgcatttatagctaaattaaatcaaaagactgctaatggtcttaaaaatgttttgaattaacgaataggggtgtgaattaagagtacgtgcccaatcacagattgtgagcaggcagccatgacacatgccactgaaattatttcatctatttggtagttcagttttaactactcaataaaaacagccatgaatatcttttttttaaagagagttttgaaaatcatttaacctaaaacttgaaagctataaactagttatccatactctcatgacaattttgttggtgaacagcaacaacaacaacaacaacaaagagatctatttctttaaaatatatttgtgcagaaactgcatgtaactcttgagttttactcctgacatacggttgtttggggaagtattctactctatacttgccaacgtggagaacaaactagttttctaagaacgaagaagtatatatatatataaaatatccattctgtattttatgtgcagcagaattaccttctgtaggttttgtgtgtatgtgtgtgcagaagcatgtgtgtgtgtgtgtgcgcgtgcgtgcgtgcgtgcgtgcgtgcgtgcgtgcgtgcgtgcgtgcgtgcgtgcgtgcgtgtgtgtgtgtgtgtgtgtgtgacttacaaggtgatatttgtattgtaaaacaataatggtgaaggaaataaaaaggcttttaaatttttgtttgttttaaatctttgtaaaattattattccagagcgtatactgatatcttacagcttacctaaatcataacttaatcaaaatgcactttttaataaaaactgatactgaaagtatgtggctattatattgtgttcatcttcacagaactcatgaagttgttaagtcaatgcagaaccaagccttgagatctcttcaaagcttgtttgatccaaatctttattatttacctatttcttcatgcaggactttaaaatgtactttcaaaaaaaccctacaggtctttgtttttcagtatataaaaagaatcacagataagttaaaatcaaactgttaccattgtttacaatacctgtgaattctctgattctcagccaaattgcccccccccatttttttttttttctgtaatggaaccaatgtagccttttcactgtgtagatgggaaggaagggtcttgagtcagccgttctcaaccttcctaatgctgagatccacagttcctcatgttgtggtgaccctcaactatgtaagatatttcattgctacatcatacctgcaattttactactactatgaatcgtaatagaaatgtctgatatatgacctcaactgggttgagaacctccagtctgagacgaggttccgtggcagcatgtggacagagtgtgacttgggacaactcttcacagaaagatgatactgatccctgatttaagagcatacgggctttaatagaagaggcctgtcttttttaaaggagagtctagggaggatggagtaaggctagtagaacttgactgtggggagttttgagcttgtgtgtcccaggcctgtggggcaaacgtgcaaaatgccccacctagcctatcttcaactctagtgggatgggcttccccgtgccttaaccagatgctatgtactgaaaaggaaactggatgggtagccatatgaattactaacacatgttacaaaggggctctttttctcctcctaggaaactttaaatagtgttttgttgtggggattgaacccagggccttgagtgttctgggcaggtagtgtccctgccccaccatcctacagtcacatgtaacctggctagtcttgaactcctgatctgcctttgccctactttccaagtcctgctgttacaggtagactgcagccagcttcctcccctgttttgctataaggtctgaagtagcccaggctggccttgtactcattgtatctcagacaggctttaagcatctaataatacccttctgtcccagcctcctaaataacaggagtgtgtcatactgcctggatgaaacgtgaaataattatatttttaaaaatgtctacttgggagtttatttgccatgtgtgtgccaggaaatgaccttgctagcttcatacaagtatgtgctgcatatcgagcagggcacttttgtaccccatctgtccccttcattcccccagacaacttcacgcctactttcatttttatatacatacatgattttatatgaccataaaatctaggaacacatgccatttgtctgcctcaaacaggcttaatttacttctaccttctgcagatccccatgaagggcaaagagaaatgtccttttgccctggagattgcaggacaggataaagctgaagaagcactgtggtctctgccctgtttgattagatgaaaccctccacaaccactataattatttcactcatctaatgagttaagcatgctgcatatattatcttagtaacccccatagaaccacaatgcacagtcactgtccgcattttacgtgtaaacccgttgaagtgtcgcagaccagaggcacacaggcggtaaagggaatccccagtttccacccttcccaggcagttctgtgagctgttactgaacgtaatgaatcagcagtgataggaacctctgcttatgaggggaagattaagttggatgactgttaattatggcctgagtcataggaaatgtacaccatgaggtgtgagggaattttaccagtgtcctagtgttttctttctgtcttaagcatgtgccaagtttgatctgtttagtatttcataaacttggttggaaccatacaagatgaggatttatgccactgtaatttgacccgtgttataccgaaagtcaactaagttttgagttcaccacgcaatagtatgttatgcaagtcacttaatagccttcatctttctctccctgtggtcagcgacctcacttgaaagaaagtaaaactcttggtattgtgcttattagcacctgtttcagattacaggttagaaggaatatatgcgatccttatcatcaaaggaatttgatctcagtaaaccagttattcctccttttgtcaggtacatgatagtgtgtgcttatagtcccagagagctgctcttaaggttgaggcaggggattatttcatagctcaaaattccagtcctgagcaacatagcaagacccaaccttaataaacaagtgtctggggagatgacttcaggataagggggcttgctatattttcctgaggacctgagttcaaatcccaacaccacaggcatggtgatacacacctttaccttcagtgctgggggaggagcactgaaacaggaggatttaccttgtcccctagctccaggttcagtgagagaccctgtctcaatgcaataaggtgaagagagagaacagaacaccagtgtcctctggcatggccatttgtatttatacacccaaaagaaaagaagcaaagcatctaaagatttctctagaatttgaagtgtttatctaagctatgcctgtcttgagtgtagtgcaggctttgtgtcatcactgtatattctcagctcctccttcctgtcccttgggagcaatgtcactggttacttattcaattgtcataatcacccaatacatcattgccattattctcttaaacaagcagttctcttttaggttaatgaagagctagaaaattaagaaccggaaaagacaaagattttgttcatctttatgtactggtgtgccttatgtagatttaagggttttgttttgatttgtctggtcagtttttggttttttgagtagccctggaacttaaagatccttttgcctctgcctgcaattaaagtgtgtgccaccatgcccagctggatttaagtttctgacctccattttcacttggcttgaggaaatgctcactccttgcagaacaggttgactggcgatgaactcctttagccttgtcttggaatgtgtttattttccctttcctttcaaaggataccttgctgggtctggttgcctggtgttgttgactctgtagcccacattttgtttccatagcctctcccaggaggcctgctggcatccttgtttctctggtggtggctgagtcagtccactggcttctttaaaactcatctttgctgtctacagtttgaataggacatgcctgggtgtcaagtttttaatatttaattttggtgttctgtgaacatctcacatgtctactggggtgtccatcattaactttggaagttgccagccatgaccacttcagatattctccactctcttgtgatatgttgaaccttctggaggttttggaattttttttcttaaattttttttctttttgtatttcatgtaaatatcaagctaacttgttcttcagcagtgctgtcccactgatgagcattatcacaaggattctttgtttttgttccaatacttgtcatttctagaattttccttggcccttcaactttccatctgtctgcttaaaggactctttcccttgcccaactttgtccagctgtgccctccttgtacttgaagttttttggatagtcctgtgcatgcatgcccccccctctctctctctctctgtgtgtgtgtgtgtgtgattccttggattctttttctttcttaacatttattctttaattttatgtgtatgaatgttttgccggaatgtgtttgtatgtacaacgcatgagcacctggtgccctcagaggtcagaagaggtgtcagatcccctgaaaccagagttacaggtgattgttagatgggagtgcaggaactgagcccctataagaataataagtactcttaaccacagagccatctctccagcccttgggtctcgttcttactttgtgtgttccaacttcagggtatttctccatgtcttttagcaaactttgtaaattttttgttgttgttgttgaaaggtagacatattaggttgggaaataggaatttaattttgatgtacttgttcatcagtgttgtacttaattcttgcaactgtagatactacaggctccatagttctttgatgtactgttttggatagccctcttgactgggcttcctaatgggtatgggttgtatttccaggattgaacttcacaagtaaatattaaaccctctaatctaccacttgactcttgatgaatattttgtccttttaagtcaaatgtaaaggctagaaaaaaactgggataggacatagggccccccaaacatttctcattccaacactggtttctatcccacctccagcagttcattagttttgctggtctatctcagaactgctgtggctcctggcttctgctccatgaaggcagaactcgttcattattctagatgaagctacatatattgtggtgtggtagttggacctgtgaccttaattctgtggtgtatccaagaatttttctatttcatccagtctttccttactgtggactcccaagctgttacactgtagaagaaatactttggtaatatttttcatagacaacaaataagtggttatctatagagtattggtggtgactaagtccataagcttgtctcctaacagctgaagaactaaacctagctatcagagtctgccttgtgttctgactgtctatacagaagatttctggaagattgtgagtagaaaatgacagtggtgtgaaaaatagaggggttataatctaggacagtgtttctcagccttccttacactgtgaccccttaatacggttcctcatttttggtgatccccaaccataaagttattcttgttgttacttcataactgtaattttgctactgttatgaatcttattggaaatatctaatatacagatagtcttaggcaacccttgtgaaagggtcattcaactccccacaagaggtcaagcataggttgaaaagtgctgttctaggaccttgtgattaacattcattcagattgctctggcccattccctaggcttcttgacagtgagacttttcagaacctttgatgtgctggtgtgcctggcaatacccatataggacttatggagctatatacaagtccagaagtcactttgctctaccaaaaaaaaaaaaaatgttactgagtggtacctacctcatgaaactaaaaaagcatctacaaagcaaagaacactatcatttgagtgaagagtcagcctaccaaatgggaaaatgtctagaaaaaactcaggaaaactaaacatcagtgttggagagatgtctccgcagttcaaagcactggtggttctcccagagaaccatggattcgattcctagcacccacgctgaaatgtacaactgtctgtaactctagtcccagcaatgcaacacccttttttggcctgtgctgtcgctgcatgcatgtaatcctcagacatacatacaggcaaaacacctatacacataaaataaaaataaaggttgtaaaaacaaactaagcatcaagaaatcaaactatccaatgaaaaattgaggcatgtaacttaacaattctcaaaagaaatataaatgacttagttttactattcaacatccttagccttcaggataatgcaaattaaaactagtttgagatttcatcttaccccagtcagaatgtctgagatcaaaataagtaaataagtgacaacaaatggtggcatggatgtgagggataggagaacacataatcactataggtgagagtgcaaactgtagctgtagccactatggaaatcagtatggaagttcctccaaaaactagaaatagattatgaggcagctatatcactcctaggcgtataccaaaggactctattttactgcagagttacctgaccatccatccatccattatccgtcctcattgctgctctgttcacagtagctaggaaatggcaacagcctagatgcccctcaacagataaatggacagtgacattatgggacatgcaacaggatgttactcaactgtaaagaatgaaattttgaaagtttcaggcaaaaatatgaagctggaaataatcattgtaagtatggcaacccccacgcagaaggaaaccacgggaatattctctcttacatgtggattctacctttgaatgtgctcgtctaaattagagtaccagtggaagtcagcagagtaacagggggccatagtgatggatggcaagggatacggaattgaatactggtggttagaactgggtaaggagagtaatagagcaggaaaagttaggaggaaatgggaggggaggtggaggagggagcatggagagagataaataagctaaagaaaagacatgtgaaaaagtcataggaaaactcactgtagaaatttctttaaatatatacatatataaaacagcttaaatggagttaccctataactggtaacagtacctctacaattagacattataggctatcagaagtccagtgtcaagggtgggtagccacttcttttaattttttttttttggtcagtaggattccaaaccacacccccccacacacacacataaacattaaaggctattaacgttgtccttggttaccctccagaacttgatgtaccattcagactttgttcctatgatgtgggatgtccttctgtatgctgtgaatatgttttgtttttattggttgatgaataaagctgttttggccaatggctaagtagagtaaaatcaggcagcaaatccaaatggagagagagagagaaggtggagttgaggagatgccatgtagctactggggaggctagatgccagggcatcaccagtaagccacaaccacgtgataatacacagattagtagaaatgggttaatttataagagagagctagccagtaataagcctaagccattggccaaacaattataaatatatattaagtctctgagtggttatcttataagtggctgcagggacccagtgggtggagagaaactggtcaagtaaaaccaggctagacagtgaaaagtctcctctgcataccacatacttgtgtcacagaaaagggattaatcaaactggtactgacttggacattttatccctgctggccagctttcattgtgctggaaggagctatgcatgctatcagaggaggaaattaatcaacattcttatccagctgtgaaccctgcaagctacagtaatgactggcctggtaaaatatgcccaccagggcaaccgtggcatgaatgtaaacaatcatattctaattggttttaaggcctatgtcacaagatgaaactcatgtctggtaccactaactaagctgagaacctgtagctggagaaaatatagaccctaagggagaacctactactactagctaaatgaaaaatggtattaaaatgcccccaaataattatccttagattagcacatctctcaaccatcatcagagaagcttcctttttttgttttgttttgttttgttttcagtagataactattagtacagagacccacaacccgtacattcagaaaatagagacagtgaggagtgctcagctctaaatagggtatctacatgacacccatttctcccacggctcaaggatcaagtgaaagagagggtggaaatactgtaagagccagaggtaatggatgactgcagttcatccactgcacaagtgactcacccagctgtgatgcgtgtattagacctacaccagatcaagccagacaaagtcctagcaagaataaatgaaggaatcatgaagtcccatccctacctgagaatctactgacaactgatggctgctgaagttgggatgaaatagaaatgtggggagacggaggatgaattagaggggagggaatagagtgggtgatacgtgctggctagttttatgttagcttgacacaagctgaagtcatctgaaagaacagaaccttcattgagaaaacacttccataagatcataaggcactgcaaggcataagcttgtaaggcatttttcttaattagtaattgatgtggaagggcccagcccattgtgggtgatgccatccctgggctggtggtcctggctgctataagaaagcaggctaagcaagccatacggagcaagccagtaatcagtgtttctccaaggcctctgcatctgttcatgcctccaggtttctgcccagcttgagttccttgttctgactgcctttgataatgaacagtaatgtggaagtttaagctaagtaaacctttccctttcctagttgctttaggtcatggtacttaatcacagcaatattaatcctaactaagacagataggggagatttaataatttagtttttaaaataaaaatctaaaaatttcttaacatatgttcttgaaatagtcaaggaaaaactattccaatgaaaattggagctcttgaaccaggcattggtggcacacacctttaatcccaatactcgggaggcagaggcaggaagatctctgggagatcaacaccagcctggtctacagagcaaattccaggagaggctctaaagcaatacagagaaaccctgtcatggagaaaaaaaagttggagccccccaattttttcaaaattatggagtcatgaatatggtacagcacacccatctacgttaaacaaaggtgacttgatcttctgaaggagcctcctatagagagaggttcatgtttaccagatctgcaaataggtgtcttgatactctgctcaccttagaatgactaaacctacctcagttacgttgaacatggtcagattacatatctgcatcacaattaataataataataatataataataataataataataataatatagacaatgatcatttggatgaaacatgacctaggtaataaagtgtttgttttaccattgactgagtttcaggaggccatagtgtgttctttgtgtgattattgtcactgaagtcttttgacttctgaacggtcattggctgtgagagggaaccaggaaaggactaagtacagataaagggtatcccatacacacttcctttctgtaacaggtagcattggcagacaacactgtacccagttccatgagcctcctgaattccacatcaaatgagtttgtaggcatttgctaactctctcaagccacattttccatgatgaacaagtacagttaatagcctgaaagggagtcttgtcttacagggctgccggcacaattcccctttggaagtggcgtttcctcacactaacaggctgatctccttcctggtgccacttacagcaattctgaatcttcctaggccaatggatgtctaatgagtttcctctggggctcctgggatcctgcactcagagggaggcacctgtgagagaagggagacttgaaggcaggaatatagccagaaggccttgtcctacaagcctctgggcccactgtgcccagcttgggacgtgggggaggggaaaaaaaccattctttccccagaagagaaaatgtcagtgctatgaagatttatctgagccaaattcaaacaaaggtaaaaaaggaacaaggtttctgaaaagccactttgtcacgtggaaaaccgacaacataggagtgaggatagcaaaactggcaccagatgtaagttgttcgatgctgagtcactcattaaaatcagaagagatgatggattgcctgcccttagaaagcccatttcttaaacaaaaacggggaacttttctctgcaaactctttctcttttcttccttccatcttgttaggagcaatcttagttaagaatttcataatgaaaccctggagtgccacgtatggtttctaccattactttatccaacttgctgtccacatatggatcatttacatttctctttatcaattaatcttatgttcacatacagtccaaagtagatgaaaagtgccagttcacttgtccctccaggccaatatacatatcctcaactcaaattgaaaatttgttcagatttttatcttttgaattaagacttaactgattgtgttaatgtattaaagaaacctcagagtggacaccaacatgtgtcaatatccattaaggaatttcttcttggattagtttggccaagagccagctcaaatttaaattttccacctctgtccctgtgtcttctgtctgtagtttgtggtttctgtcccatctgttgtctgtctgttgtgtgttcctgatcagttcctgttgcctttctactgtgcctttcctacatctctgcctggccctttcctccttgtgtcttgaacagcacagaagacatggtgtgggaaaggaacaagggattccttacagagcttgttagcagttttacacggcagacgctactgtactgacacgattcacccagaacactcaaaactatacagaagttatcaactgcatccacatgttgctcccaacatttgtttggtttatggatgcttccaaactgttgacttttagcaaaagattgccataacacacacatacattattctgtattaggttcatggaagaatacataatttaaggttaaagctatgtattgggcttatattgtgagggctggttgcatgaaaaatctaagtcataatatcttacattgttctcttaaaggcaggttaaatttaaacaggtgatgtacacagtaggacttcaggctaagtacacagtcttaaatgaccttgaggtgtattattaacttggctgcaagaaggaaagaatattttcagaaaaatgtatatccacaattgatgataaaataaacaaattagtgtactttaaatgtttgacaaatgtatttatataaccaaaacatctatcaagatatcaaataatgttatctcaagagaagtttcctgtagctttccctaccaaccttgactagccctgcagatctggggtaaattctcactttatgtttctcctactatgcctgctagtttttaatgtcaccttcatacaagctagactcctctgggaggaggtacctttaactgagaagatacttccataagattagactgtatgcaatcctgtaggacattttcttaatttgtggttgaggagggaaggtccagcccattgcaggtggggctaccatgggctggtttgggttctataagaaagcaggctgatacctgggtggtgcacaccattaatcctagcacttgggagtcagaaacaggcagatctctgtgagtttaaggccagcctggtgtacaaagtgagttccaggacagccagagctgttatgccaagataccctgtctcaacaaaccaaaaccaaacaaacaaaaaggaagcaggccaagcaagacatgagaagctagccttagtatgcagcactgtggcctctgctttggctcctgcctcctccaggtttccatccagaatgagtacctgctctggtaggtccaaaggaaacttgggacaaagagctaactgtggtgcctattagcataccaaagcccatgctagcctccaggctctctcagcatcacaaatacctgttacagagtccatcctgacattctggcttttctcatcctgccccctaacctaaatttctccagctcttggggtccccactcctatgttctcgtccctatataaccctatataactatttgggccatgtgttctcttggtcctctttgctctctctctttgtcttcctctctcgctctccctcactctcctctcatggccccgttcagtcttctggccatgtttaatctactattttctctccctgcgctggactcttcctcagactgtactttccctcgtatctacaatcaaaaccttctcctcattcataccttggatcgatgatgtccttgttttatatatcatcaacggattgtgagtcaggatacgtaagccaaatgaaccctctactccccaagtcgcttccgatcatgctgttttatcgcagcaatgataaccctaagacagccacatttttcttttctttttcttttggttaaccatggtaggcaagtgctccactattcccccacaataccatgcattcagtaagtgttccctatgtctgctttacttcactctgctttatatttttgcattcatctctgctaagtgccttcattgacaacttgactgactctagaatcatctaggagactgatgaggcccagacatggatgtggctatgagggcttttccagagacaactgaaaaggctggctctgagcagtagactttcataagctgggagcacagacagaaggaaaggtgagaaaggtaacccaatgtccacatcctctctctttttgcttcctggttgcccatgaagtgagcggtgcttccctgccacagtccccacactgtgacatcctgcttaaagtgtacagggccaagggaccacaggctgaatattctgaaatgggggggggcaaaaatatatcctttctcgcttaagtcctttttgccaactcttgaatcacagccatgtgaaagctatactttgtgtgtgttgatgattcactctttctattagagcagggacagattgaaccaatagtctaccgctcagctcttcatgagtactgatatggataaagcagccaagaacactcttgtataaactgtgtgcttgcgctcaggctgtgatacacggagttatgttttcctgtgtataaatacgtaggtgtgtgacattgacaggttgtagggtagatttatatgtcctttttacaggacattcctagagcaatttcttggatttttttttctctcttaaagatgttcatgtgttcgggtgtcctgttcctctagcagtgtcagatctggatccttaagactatcctggagtcctaagataactagctgttggattggcctccttggacctgtgtgatgagttaataacatccatcgtcatttactccagcttggagtcagagacactgtctatattttactcgacagaataaataaatttaaaaaaaagatgaacattcctgaaggattgtgtatacgaaagtgatgcacaattgctttcaccagccacaggctcctgtcagctacttttaggtcacaatcaggaaatggggctgctgcacatggcaagataattacaagtgataaagtaagattaaaaggtccaaaatgattcactggtcaatttttccaaacacttaaggaagaaattatggtcattttctatggagctgaaataagacatctgatctcccttgttcagttttgccttctcttctatgcccactcctctagcctcctcttgtcacgtaattgataagggtctcctctcagttccatcacttccatcacttccgacatcccatagctcagatttcctgtacagaccagccctgactccaagggtagatgcagtttaagcaaaggagaccctggagcctcgaggcccaattatcaggtaataaagctcagaaggcagtcctgaaagctgcaggtggcagagatgaggaacaggcagcccctggcccaggttcctgttgggcctgtgtgtcttcatgactacctttaagagttcaggttttagcaaacacttgtgtcagctccctgctttgtcctaccttagtcagaggcctcagtagactcttcctgaagaaagcttgcttcagcttggcttttgcctcagcattgctatgcagcaattcatttccaagcagaaggggaacaaagtctttcttgcggattctaggttcattagcatcctgtgtagtgacacaggggaaggaggtggactgccaagagttgtggcagtggcaaacacagggcacatgcctgagctcttattaactccacaggcctgaggctggggcacaatgataacatgtctcaagaagaaaaacaacaaaaacaaacgctgttccaacactggaaggatttactttcttttctgggctttcacacttgtaaatctactcccaaacagaagaatcacacacacacacacatacacacacacacacacacacacacacacacacacacacacacacacatcccactccataggcagtattgaaggaagctttttttggggggggggggttccctggagagacatcatcgaaatggctttatttgtttctccaaattacccaggtaatttggtacatgtactacatgcaaatacttttctccatcagattgcattctgtccaggaaagacatcttctgtcctggaacttaactccttcatccgaaatgttcttagcttcagtctctgcactgacggttcaatcttgtctctgaggtgtgcaattgataccttgggaaatgaactgattgctttccaaatcagagaggacaagcagggtggactagctcagtggctagtgctgtcaccgtttaatacagttcctccttgtgaccaccccagacatacaatcataacgctaattttgctacttttataaatcgcgatgttaatttccgatggtctgaggtaacccctgtgaaagggtcgttcgacgcccccataaagggtcgcgacccacaggtcgagaagcactgctctagtgtgtgcaaagattcgcccatcagcagggtgccttgtgccttgctggatgagtcagcatgtaagtggttaagttagagagccgtggctttctgggttagagcatccagcctccaagagttaacctgcagcggtgttcgggagaacccaggcagaggatacacaagcgtcccggcaggcactctggcttgcagggaatgacatgccgttttgaatgagcagctgcagcagcgagttggggtacgtggctttgctttgattgatgctgtattgttttctctcaagagaacaaagcaatggttcgtgtttgcaaacaaggtccctttgagaaagaacagttgtctactagcgtggtttctatcatgaaaatgagagcccagggtgcagggtgagtgcctgcagattctccatccttgtttaagctaccccttacatcggtgggctgtcttcacactcatctgaattccagtgttgcatgatcaggtcatttgaatgtcatgattgcagtgagattcaaaagatatttttgctatatagctatactcagaggtatagagttgaagttgtttgttgaattggtggtgcctggcggcagaaatccatttctctgccccattttgggagtcaagatttaaaacctcagactcccggagcaaacttctacaaattcatcataaacctgaatgaggcaggcatcgtcttagatatgacttttccccctgactgactactttagtccccagtgtgtgcagcatgacctgaaacaaccttcagaaatcctggtcatctactcaggctcctagactgctcatgttggcatcaacgtcacttcgcatacctttattttgctagtgaaaaacatatctgaaactccaaataaactggaaatacctttgaagatttgaatttggtggaatgaatttcaaggaatccaggctgtagctaaggatctcattctctctacatttcagcactgcagtatcagctactagctaagaacactgactttttccctgtcagcactaccttcagattaaaatgagttaccccttacccagcatggtgatccaaaccaatattgaaatgcttttgcattacccagaatgttctaagtgtttgtagcttctattcatctgtatttcatcctgggaattcttttgataactaaggtttctctgaaaaaaatccaaaggctgttgtaaaacttgagcaagccatcactctgagagactcacacttcacctgaagccatggatatttactaaagcgaaggacaggtgatgggaataagggatatggagcctgggctctgaaggttaatggttgctgagctaaagaaacatgggtgagaggaaatttggggaaaagaggaccactgaagatacaatatagaagcactgtacacagtgatgaaggtgaagacgtttacaaacttccaggaagacatggtgcagttagaacccaagagaatcattgtacagatctccacctaccatttaataccttctctaaaaatttaccccagcttggacaccatattgaataagaatacacatatacagagagagagagacagacagagagagagagagagagagagagagagagagagagagagagagcccttgtcttgttttttttttttttttgccttaggaaacatggtttttccctatttaatataatgttggctacaggcttatcatgtatagtctttatgtggagatatgtcccttataaccctatatattcagagattgttttcatgaagagatgttgatgtttgccaaaagctgtttctgcatctctgaggtgattgtgtactttctatccttaagcctatatatgctctgtattatgtttattgacttgcctatgttgatcaacatgaatgcctgggatggagccaccttaatcttggtatatgatcttaatgttttcatgaacacatttgacaaatattttagattttaaagatttgttttatttttattgtgtgtatgtgtatgtctttttgggcaggtgtgtacacatgagtgctggtgtgcttggtggccagtagagaacatcagatcctctggagctggactagggtgctaggaaccaaactcagatcctctggaagagcagtgcatgctcttaatcactgagctgtgtgttcaggcctgcaaggattttattcatctatgctcatgaggagaactggtatacagtcttctgtctgtttccgtttgggtgtcaagacaatactggcttcacagaatgagtttgttaatgctctccctgttctatcttgggaacagtttgaagagtgatggtgttaaatctttgccaaagagttggtagacttcagcaattagttcctctggtacagggcttttcttcatggagagatatttcattaatgtttgactcttgttgattatggaactgtttaagttgctggtatcatcttgatttaatttaagcaggttatgtgtatatgtgtatatagggatttacccatttcttctagactgtccagtttttaggactattatttttaaagtattccccgatgagcagctggatttctttggactttgttataacactaccctctttcatctctaattttattattctggaactttcctctttggttagtttctcaatcttatttatcttttcaaagaatcaattttgtatttaattgattcaatgtgttgttctttcactggttctgccctcatctttttttatttctagcctcctactgctttttggttttggatggcttttcatcttctaaaaccttgatgaacaatgagttcatcactggttatttattgtagacatttatgttgtggttgtattttaatttcagaacttaaagctatacatttaactctttttttttttcaactcatgagttagaggctttaattcacctttctttttttttagtcattttttttaatttgaattagaaacaagattgatttacatgacaatcccagttcccttctccctcccatcctcccctaccacccctccaatttaactcttaggactgccttatttatagctcaatctgataaattgtgctttatttaattgtagctgttttttctaatattttgctcttttggcgggcctgccactcagctcccaaataagtcacacatggaggcttattctgtcttatgaatgcccggcctcagtttggcttatttctagccagcttttctaaacttaaatgatcccatctaccttttgcttctgggctttttccttttcttacttctgtatatcctactttccctcttactccatggtttgctgtgtagctgggtggctggtccgtggagtcctcctctctttattctcttgctccttttccctctctgatttctccttccatttattctctctgcctggcatccctgcctacccttcctcctgccttgctattggttgttcagctctttattagaccagtcaggtgttttcgacagacacagcaacacacagctttacagagttaaacaaatgcaacataaaagaatgcaacacatctttgatcattaaacgttccatagtttaaacaagtgtaacacatctttaaataatactccacaacatttgtttctagaaacacttaaaatcccttctgattttgctgataatctgctggtcattcagtagtatattttcattctccaagtatttgtatactttctgtgatttctcttactatttatttctaattctatgtcactattaagttactagaaattattttaatgatgttgcatattttacgattttattgcctaatgtgttctattttagcttatgttccacaggctactgggggaaaatgtgtaattccacatttgttggatgcaatactcagtccctatctgtcaagtcaatttgatctagttctgatttaattcagaggcttcctttgctgattttgttgttgtttttattgttgttttggacgacctatttaaagatgagaatagggtattgacatcacccactgttactgtatcaaacattttatgctcattcggattctgttaatggatctggtagctctaccattcagtgcatatatagctacagttgttatttcttcttgatgatttttttctttattaataggtagtagctttcatcatctcttctgactaattttgatttgatatcttcactattaaatctcagaattaccacaccagcttgtttcagcttccactagctggaaagactggctttcaaactttggctgtcaggctgtgggtgtctttaccaatgaggtgtggttttattcaagtcagctagtttgcatttctttactggtgatttgaaacaattgcaatagaggcaattacattaactgctgcatttactaattcgagtagttttatttgttgttttctggttggctggattgttctcatttttaaaaggtttatttgttttattttatgtatacgagtgttttgcttacatgcaggtatgtgtaccataagtatgccaggagcccctcaaaggtcagaagaggacattggttcctctgaaactggagttacagacggttgtaagctgcttgtgggtgctgggaatcaaaccagggtcctctggaagagcagtgtgtgctcctgatgatgagcccactttctagtcctgttcttttcttctgtccctgttagtgttagggctttttctagtttactatgttacacatgagtgattcgtttctggctttcctttgttgcatatacctctcatgaggttcattctctcctgtgctgtcaccattcagtctttcttcatgttccctgtatagtattcttttaactgtatccagcagctccgcattggtcgttatgagctgccttcgtgtgtgcttgtcttgatagccttatttctccattaattcaagagatagctttgctggaggtaacacgttggttggcgttttatgctttcagggatatatcagtccagtttcctagcttttaggattgctagtgtaatagctggtgttattctgttcaccttcatgggcaacttagtgttttccccttagagatactaatattgttcctttgctttatatttttgatgtattaactgtaatatgttgtgggggatgttcttccctggccacgtctatttggaattataaatgcctctcatgttttattataaatgcctcgaatttcttcatctagttttgagaagcttctgccataattttgttgaacagtctttagtttttaacctcagctccttctacccactagattctgaggtttgttctcttgatcacatcccatttcatggtcttgctcacggttggcaagacccttgcctttgtcttctatccttgatgtactctccttcttcctgattgagtctgtcagtgatgcttttctcttcgttatatgatccactgagtctttcttttttaccatttctttttcaaaaaatctcaaatttcaaaatttccctgtgcatttattatgtattaagggatgacaataaaacaactttctcttggagttgtttgatcaagagcaagcacaagtttgaattctccacttgaaaccccatgtgtcttctgcctgacacttagcaaaaggctttgcactatctctattttttatatgctttgcaaatgattaacttggctgcaaggtccagcaaaagttcagcctcttagaagtcaggagatattttcagtaaaaatgtaaaaccatatccttgctgatttttcatccatactgataacccttttgttttctttcctttttctttctttttttaaaaatccattttatgggcttttttttttttttttttcctgcgttgctgctgagctttctctctgggtcttgtatttaagtcacctgattgtatctttgaggtcagtgatcagttttactgtaagagttgagatctctagcaggcatcctgtccatttcagaatctttgaatttgcaagttgaggaggtaccagagtttggagaatttgtcatgtcttacttttcagtgttcttcctgttttcatgatgcagtttgtacatttgttggcttagctgtcacttctggctttattttgcgggtctttagatcttttttcaagatttatttctttttagttcatgtttatgagtgttttgcctgcatgtgtgtaagtgaatggaagaggttggaggaggcaggggaacaagaaagaattgcaatctctctctctctctctctctctctctctctctctctctctttctttctttctttctttctttgttttaaaggaacaaaagatttaaaatccttgtaatttatgggctagacaggtttacctcacccaccagagactctccacattgcatcccctggagtggttcaagttctagttgagggtgtctctcaagtgctttgggtctggagtggcaaccacagcactgaggagtacaagagtagaaaatgctgatttcagagatgcagttgtgggtgtgtgttcgtgctcttcagtggtggagacagatgggttctcaagaggctgatccttccagggaatctagagctgctcccaggcactgaggacagatggtcttttctgtggtctctctgtctgagtggaaccacctggcacctgcactttctggcttgttgggggtggcccctcctttgcacagctgtctcccagggtcgtctctcaccctggagctgtagcaggttaaattctggttccctggcctggaattgtttctcgtttccatgttccagggcagaggaggtttaaacagtactttctctgtcaggataacacctaaacactgcctgctgagttatacagagtgacaaaatgcgattctgctccacagctgccctgtggccagaggaatcactgtcttaccaagggtgggttcacagtgaggactctcgtgggcatctagagggtacaaggctgctctcttcatcggggatgtctggctgacctcttggatgaggcatctgcttttcctctcctcaccaggggcttccaggctgaagctgagttttgtttggaggatttacctcccatgctctgtctttttcctggcactttccagtgattctgtcattactttttgagaattttcaaagttctccctcattctgtctttgaaataaactaagtcctaagtggactcttcttacccaggtcaccaagaggcaatttctagcccattatcttactcagaaactgtcctgggccttcttttgagccttatgtgacagggttgtatcacagcagttggagtgaaaagatacaagtgacaggaatttgaatctgatgttttcagggtatcagcttttgaacctcctcaaattttagttgcttcatttgtaggcatgcgatactatataccaacctctgggatggtcctgaggatagagaataggatgctactccaatgccaaattgtctcctgcagacagactcatcactagtaagcacacagtgcttaagaggaagatgtggagtaagcaatgaactgagggtgacgggggtggggggtgggggtgggggtggctcagcacataagagacagcatctatgtggtttacctcacaccttctctgtgttccgtccctgattctgtgaagtggtttcttgttagtagggttcagaaaggcatggcccttcctcatcactgctgtcacaggagcatcgtcctgtgaggtgctgcctggagactttgcttctggttaaacagattccaggagctggttctggacggtcatccaaggtttcctgcagtggtgtttttccagtctctttattgctagccagagaaagaagtacctgtttgtccacaagaggtgtgagagatgggagtgatagcaagcctccagagtcaattcagtgtgaaaggaggaaatgatgtaagctgatctgcaccagcccataggcagtaggagtttcatagaatcaggaggaaatgggtacaatatggccaattatccatctccaatttcaacattccccaacttgaatctcctcatatcctgaggaatattctggagagagaagggagctctgatatcccagctgcctgtaccaaaggtcacttcagtctgtgatgctactctgctgtcttgacattctttatgaaggactttgcatcatatttctctcagaaatcggctctaataacagctgtacctgttttgcaaggtggtagcaactcacacctaggaatagcttcaataacatggcagtcaatgtggccacagagggcaccatcaataatgtactgctgacagagaatcagataggtgctcttggaactccaccaagaagtgacatcaacgaaggcaaatctcctggaaccatctttgacctacattatcactgttaccaacatttcttaattgatttaccagcctggtctgatctgggaagagcagaagccataaagaaaaggctcacaccacaattttcatacaaatcagattcaactacattcattggataatttctatagccatggaaggatcaagtttcaaaccctggactacgctgtatgcctgacttccagggcattctgttccctgagactgcgcttgaaagatagcttctaggtgagttggcataatgacagtggtgtgttggaaacagctcattttggcttgttagagccagttactgtacagtcctgttcagagctgacttttttattattattactaaatcattttttaatttgaattagaaacaagattgttttacatgacaatcccagttcccttctccctcccttcctcccccgcccccccaactaaaaccctacctatcacataccctttcttctattcttcccctgactcaacctttctgctccctcatgacctctgcatccttcctcttcttcccttctcattctcatagctccctcccccttcttcccgtgctctcaatttgctcaggggatcttggccctttccccttcccatgtatgtctatcttagggtcctccttgtttactagtttctctggcagtgtggattgtaggctggtaatcctttactcgatgtctaaaatccacacatgagtgagtagatatcatgtttgtctttttgtgattgggttaccttgctcagaatggtttcttctagttccatccattttcctgcaaatttcaagattccattgtttttttctgctgagtagtactccattgtgtaaatgtaccacattttctctatccattcttcagttgaggggcatctaggctgcttccagtttctggctattacaaatagtgctgctatgaacatcgttgaacagatgtccttgttgtatgaatgtgcttcttttgggtatatgtctaagagtggaattgctggatcttgtggtagactgattcccattttcttgaggagtcgccatattgatttccaaaatggctgtacaagttggcactcccaccagcagtggagaagtgttcccctttctccacatcctctccacagagctgacttttgagaactgtcttttggttactggaaaccagcaatgctgaggtgacagacgctgtacatcacaaagctttttatcctgtaagagctggttttaatatttatcaattgtctagcagtacttgttgcagaaaattttggatagggaaatgatgaaccattttaagacatcaggagaaaaaatagccttaattcaaaattactttgaaggtttctcctccagtagcaccatgaacactagtcaatagaagtgaagcttttagttgggtgttagctgctactccatgttcaatgacataagtaagttatatctttagcaatagggtcttaccatcaggttatggagactaaccaatagccttgcaataatagcaggtgatatttggggttgtttagggactcctttggccaatgactcaacaaaatgtaacccattcctgccacttgtggttttatttgttggcatacgaaaactaattggagcatcgtctgcaccattattcggcaatcccatttaaattctttttatatacatttgtatttagaaagtgtctatcatattagacttctatatggattttcatatatgttagttgcccctccccatattcctttctttaccttgtcatatataagcaaaagaccaataacaaaaaatgcataaagcaaaatgagacaaatagttgacaaaaatacaattgtgttagtcaagtactcctgggcatggggcatggttgatatccatgagttgtggatatcaataatgtggatatccattatttccttccctggcatgtatcaattgcaaatagtttcctagttagtggtaggactccatgtctacttccccctctcagtgctgggatttttgtctggtttgaaactgtgcaggccttatgtatgctctcatatcagtcaaaagtggctgtcctagaacttgttctatagactaggccggacttgaacttaagagatctgtctgactctgcctcccaagtgctggcattaaaggcatgaagcaccatgcccagcaatttatgacattttttaaactccagtatttctctgtgtagtttttggtttgacatcctgtgtttttaatttccggttttgtctcagtttggattttctttagtgattgcatttctttgttaagttctactttcacatcttgcatgtttttattattttattcaactgcctgtgttttgattggggaatttattcatattctctttgaacatactcataattgttattctgatgtccttgtcttatgctttagttaaatagattttctcagagcctattacaatatggcttctggcagaggcatattgtcttggttagtcatgtttttgtttctgcaatgatatttaggcatcttgaattacaatgtttggcgtgtttcttggtgtggctatctggtcttgactatgctagatgggtattctgattttggttgttgttgcccactatgagtcccagccacgtgtggtggctgtggggttccttctggagaatgagtgattctgtatctcagccagttgtggcaactgggggctccctggtggacaggtggttctgagccattctgctggttgctagggagttgcaaaggaatggagatggggtagaaagcaaaggagcagtgagaaggagctagggtgataccagttccaaaccaagaggccgaaccctaaagaggtggaggtgggctggaaggaggggttcaggcaggcaggctgagtcaggacaaagagtaagtctggagagacccaaatgaagaataagaaggaggataaagacagcccacctgactcctgacctagtgggggctgtgggtcctcagaggagagcacttctacaggtcagaggagtgccaaaggaatggggacaggctggaaggaaaggctgagaggagcagaaggaagagctaagaatatcttggggttggcaccaagaggctgagtccctcatagcaatgttaatcagatactgttacccatttacagatgagggaacaaacgcagagaagttacatgacttcctcactttagggccatgctctgatttgaacggaaggaaattcaatccccaaaggaacaatttagaacaaaatgttgtattttctcattgacaggagactggattaaaatcagttccttctccaaacatgggcaccacttttttaattttttttgcatgaaaaactatcacctcccaggattcaggagtgagaaactagagaagtttaagtttgaggccagctaggcctacgtagcctgtttcaaaacacctaaccaaacccaaacccaatcaatcaaccaataaatcaaacaaacaagaagtggaaaacaataaatgatcagggacaccctgctttacacagtgctctcaagatctagcagaaaatggaggagtgcttcccattttgtaatctaaatgaaggggaggggagggaaggggagaggagggaagggaagggaaggggaggggagggaagggaaggggaggggagggaaggaaaggggagggaagggaaagtgggacagagggaaggaaggaaaaagggaaagagagaaggcaagcagagcaagcaaagctagtttatatccactcttggcctttccctaactttagttctgccaggacacttacataacgtatctttggaataaataagcactggacttttttcctatacgcattattttaacagtaccaagaatcaggagaaacttttatattcatgggattctgggtttttggtgactgttgccaacagactgttgcctcattctgatgtttggagccctggagttggcttctaccaaacgcttaaacattagccatttcttttcttttcataatcaatttgtttttccagagtctgcttgtccctcttccccctgctccttcccctctttctgtagagtgatgtttggttactccatttctcttactcctacactaagcaaaccccaagccctgctgacacatcaccacttctctaaggggttaccttttccgtttgtaccgccactggcacatcctacttgtgctctaacttttaaagaacttagaaccatttattaactcttttagaatttcatacagtattttgatcatattcaccctctactcttcccttaactcctcctggatctgttcccacccctctatttccccccagctctatcccctcctttttctttcttttcaacaacccattgagtccaaagtgctgcccatattctcccaggcatggactcacccactgtagtgtggtcagcttaacatgggccatcatccccttaaagaaaatggactctccatccccaggaaccaacatactgtcaatagcaccccagttaagggaagggactcatgctatcctgccccctccatgatactgactggcttcatcttgtccaggtgatcatgatcacagctgctgggagtttgtgagtgccatgggactgttaatgcccagcagactctgttttacttgggttctctctaatctctggcttgtccaacctttccatgcccccatcctgtgggagttcctgagttttgtggggtggggtaatataggtttgactctaatgttttcttaatggtatctccttttgtcagtaactggctatctccacctcaaaggttaccattaggcttcaactttatttccagtagaacatatactggaggattaattcgggcttctctggcaacagtggatgtattagtaatgtcttacagggcaaggggatagagcagaactatctgctggtggcctctcccggttttatttcatctgcttatgccagatcaacccttgaaaaaacacactctttaccaagtgtttgaattggagcagggccctaacttaggaaatcatatgattgctctgtgcacttgttccttcatctgtaaaatgagcaatggtatctgcagaacattgctgtgaaggccaagtgagaatagaggctttgccacttctcttctttagacttcactaagttccaaatctttggtctagcatttgagtatcattaggctctgtctataatcataacttgtcaatttcatctctcattggcctcctacaaaagcctgtatcagtgggtctttaatatgtgcgcttctcccatcccctttctgaaaatagctttttaaaaaaaatcacacaatatatcctattacagttttccctccctctactcctgctagttttcccaacctccccccccatccagatctaccccctttctgtttgtcattagaaaacaacaggcttggaagagataacaataaaataaaacacaaaaaggtataataagacaaaactaaaatgaacacattgaaataggacaaaacaaacagaaagaacagagaccaagagaaggcacaagaaacagatacagacacacagagaggactacttgattgctctcatactgaggataaactggaagccataatctttacacaaaaaacctgggcagatgtgtgtaggctcaatgtgcatacatctttagtctctgcaaattcatgtgagctttgatcatgttggcttagagggccttgtgttcttggtgttctccattctctctggctctttctgtttcctcttccacagggttcactgttctctgagggtagggatttgatggagacatcctgtttaggtctgagtgttccaaactctttgcataatatctagctgtggggctctttgtttccaactgctgttggaggaagattctcaggtatggctgagcaaggcactgatatgtgagtatagcagaatgtcattaggacacctttcttccctccctccctccctccctcccaccttcttttctttcttccccttgatctcattcaaaattgtcttattgctctacctagaacttcaagtactatattaaatagctatggagagagtagtcaactttgtcttgttccttattttagtggaattgctttgagtttctttccatttaaattgatgtttcctatgtatgtgcttgctgtaaatagcatgaaggatattggattttgcaaaggccttttttatagctagtgaaatgatcatgtggtatttgtcttttagtctttgtatatgatgaattccatttattgatttttcacatattaaaccatctctacatctctggcatgaagcctacttgatcatggtgaatgatctttgtgatgtgttcttggtttgcaattttttttggaatatttttgcatctgtgttcataagggaaattggcctgtaattttctctctttgttggatctttatgtggtttgggtatcagagtaactgtggcctcataaaatgaattgacatttttccttctgtttctattttgtggaataatttgagacatgttggtattaactcttctttgaaagcctggtagaattctgattttggtaatttgtatattctttctctgtcttttaattagtttggattagagtctgtcaatcttcctgattttctcaaggaaccaactttatttcattgagtcttcttttttgtttgtttgtttctattttcttgattttagccctgagtttgattgtttcttgctgtctagctcttttgggtatttttttttcctttttgctctagagctttcaggtatgttgttaaattactagtaggggatagctccatttttttttaaatgtaggcacttagtgctatgaacttgcctcttagatccgacttcattgtgtctcacaagttcgggtgtgttgtgcattcattgtcattcaattctagaaatactttaattttgttcttaatttctatcttgacccacttctcatttggtagtaagttttcaattttaataagtttgtaaaatttctgttgtttctgttgtgttgacatgcagtttgaatcagtggtgatcagataggctgtagggtgttgttatcattttctggtatatgttgagacttgttttgtgtctgaataaatggtcatttttggataaaggtccatgaagtgcttagaagaagctattttcttttgtgtttggatgaaatgttttgtaagtatctgttaggttcatttggtttataacattagttagctccagcatttttctgtttgttttttgtccagatgactcatatattggcaacaatggggtactgaagtctcccactactagtgtgtagaggtcaacatgtgatttaagctgtggtagtgtttctttttattaactcaggtgcctttttgtttgctgcatagatgttaagaattgcaagtcctcttgatagatttttcatttgatggcaatttagtatccttccatactcttctaattagtttttgtggcaatatattgtttatgatctaataaagccactgaagatcagaatgcaaagctagccacagccatagaagctgggtagtggtggcacacacctttaatcccaggactaaggaggcagaggcagatgaatctttaggaagagatctctaggtccttgtgcccctttacgcgtggccacaggtgaatatggggtgtgtgggataaagatctgagtagaggggcactcatgctctctcagggttcaggtcaggtctcagagagctgctgagactggattctcagagtgccaatctgggttatgggtttctcatgtaagtgatttcccctcaataaataaccaacaatatccatatcctatgtatggttattttcctctacatgaatctctgggagttcaaggccacccagggctacatgagaatgaatcagtctaaaagagaaacagagctcaagccttcaatcccagcactagagaggtatataagataggagcaggacattcagtattcagtcttctggcattcagtctgcagtcatgctaaggatttgtggagccaggatcactcaccaggctgagatacaggtaaaagctagtgcctggctgttttgctttccctgatcttcaacttgaactcgatatctgtctctgcatttttattattcatgttacaagctttggtttgaattctactttgtcagatattaaaatggctatgccagcttgcttcttaggtctttttgcttgagatatagtttttccatcctattaccccgaggtgatgtctgtccttgatgttaaattgtgtattttggatgtagcaggatgggtccctgtttttgtatccatgctattagtctgtggcatttattgatgaattgagatcattggagttgagagagatcaatgagcagtgttttgagacagaatttctctgtgtagcccagtctgtcctggaattcattctgtagatcgggctggccttgaactcagagattcacctgcttttgcctcccaagtgctgggattaaaggtgtgtgccaccactgtctggctaaaagcaatgtttgttgagtcctgttattgatttgtttgtttgttgttgttgttggtagtgtgtgtgcttcttcttgattagctggtttgggattatttattccttgttttcttggatgtggttaatctctttgtgttggaattttctttctagtgctttctctggggatgggtttgttgatagggcttaaatttagctatataatcaatgtcttattttctctatctattgtgattgaaaggttttctgagaatagcagtatggactggcatctgtggtctcttagagtctggatctacttctggcttttagagttgccattgagaagtcatgtgccattctaataggcctgcctttatatcctgcttgactttttcccttacatttttaaatattctttctttgttcagtatattttgtgttttgtttcctatgtgctgaggggaatttcttttctggtccagtctgtttgatgttctgtatgcttcttgcaccttgataggcatcaccttctttaagttagggacattttattctatgattttgttgaaaatattttctgtgcctctgacctagatttcttctcctttcttgattccttttattctcaggtttggtctttttatagtgtcccagagttcctggttgttttgtgcctggagtttttatatctaacattttctttgaccaaggcatccatttcttctattgtgtcttcaatgcccgagagtctctcttccatctcttgtgaatataagacaaggatgttgatgaggcttgcccctgaggtttcgtttccacatttacctcagtttgggttttctctattgattctattcctactttcaggccttggcctattttattcacttccttccattgtttatattttcaatttatttaagggatttactcatttcttctttaaggactttgattgaattcataaaggctgtctttatggtctttgtcttgtgctgcagctatgttgtaattctcagggcctactatggtaggcttgctaggctctagtggagacatattgtcctggttgttattgattgtgttttatgctgacttctaggtacctgtgtttgtgatgattataattctatgtgccaatatctagtgttgtctttgttggatgtatgttttgttccttggtttctgttgccctctatggttcttcagagagtctgatagctgtttgttgcctcccatgaagttcttctgggatactgctaggcgtggtcaccggggattcctggcaaaatgttttgctaggtattaggagctgacaagtaggaatggggttggactgggggcagaggtaagggcgggctaagggattccacaggaaggagggaaacaggatggtgcactaggatctacttagtcctctggaaatggggtcagagagtgaggagagtcccactgggtaatctgctacagagctggagatgaaatagggggttggatatggagtagaggatggacagtaaaaatctgaagcttgcttacctgggttgccatacttgcttctctggcaggcttggctagtggtttctcagggaatacctgctagagcagggttatgggttaataggatgagtaggttgcaaagttaacagagaagatctgcatgctccattggagatggtggtagagaggagggtaggccttacttagtaggtggtctgctacaagatggagatgagaacggggaatggtttggagaagaggaagaagaggcgaagatttccagttagtctacttgcttccctggcaggagtggcattagtgagtcttcagatgcagtgtcacaaaggatcagttggtaagagcagatggcattataatcacaaagttgacacccagacctaattccacatcctgtcttaactctgtcaatgacccagggtgtgaaagtgatagtattataaaagaatgtggtctttcacaatgttcagattaaaagacatggagagcttctgtttccagcttagacaagtcacatcagtaccatagcttttgctatgctttgtgggttttggttttgtgttttgattcttgcacactggctaacacttaccccttggttacctctgtgttttttcctggcagagtcaattttgtttttcagagtacggtgtgaattctgcctttttcatgatgccttccctgaacattttttcaaaccagatatgagcctagataatattatgtttcggttgtgagcctagtctttaagggctgagccatctctccagcccaatattacatttaactaagtatgttatttactgtgtggctgttatgtctgcagggagaaagtcttcctatctcactgggctgtatacacactgggtctcttgtgatctggtctctgttcacatttgtgccctcccttgaaaaccttttgacttctctgttgctgttccactaaacaacttgtattctctgtaactattttctctctcagttatcttcagggctttccacatgctatatactctattagttaaagaggattaccaaaatgtctataattcttggcctctcccggaaaccatatcttcataatgtgattgctgtctggaatggggagaccatttctcctccccttgagtctgagctggccctaagattgcatttggccaacaggcttcagggaaagttaacctgtgataattctgagcctagacactgaggcttgcctctttccatgcatttttttgaagcttgcccagttgtcataagtgcaaacctctactaggctgctgacaaaatagaacctacatggagcagagacaatctgtctaatggagttttcctacatgagtaattcccagtcaagcccccatctaacttagcatcactgtggatgtgagagcaagtcccagattatagcttcccagctggtccagaattgtgagctaaagaaatgagtacttttggctagtaaatgttggggtggtttgttatacagccacaaatattgatagactgggtcagccacctttttcatttcaacttagatatcatctctttggcaaagccctttctggcaatcttttttttgtaggcttacctcttagaaatcccagaggtacaaacagtccaggattagagttccttgcccatcatctctgtttcacagtagatttaatttttttattttaaaattttattatttaaaaattcaatatttattttaagcagcattgaggatgaaacccagactaacacatgctagacatagactttgagacatcccagcccagcttgtaagaggtgtgagggtaggacccttgctttttgtgttttccccacaaactagggtttctctgtgttgccttggctgtcctggaactctggaactcattctatggcctcaaacacagagatcttacccctgagtgctggaattaaagatgtattccactactgtctggctatcaggatccttgtttaattaaatattccatagattctcagaaaatgctgttgaaggaaggaatgcagaggttgcagtttttagaccgtgtatgttcattttttatttccattgaattgacttgaagcctcatgaacttcctttgttttattttcctctccaagttctttacttacatttaaaagtcaagaaattggatattgacttctctgttaacgaacatttcattaacaaaatactgggtctgagcttactcatggcacagacaagtgctggctatgccctttggataggtcaacacttttctagctctgacagtcagttgtccctgtggcacctcaatgcccatcatcatttgccatttccctccagacagaatctgcaatctctctcacacacttaccctgctccaaagaagagtggctgataaacatgcccacttacttgcttcccctttcagtatgagagtgatgtgggcagccctggcctccctaagcattgctaatgcccccaatcctctataaaccagcagtttcctctctccactcaaagggttttcaagggcaattcagttcttcatctgagtaaattggaacaagattttttaaagtcaagtattgatttgcatgtggctggctgaagatgaccatagccaagagtgctggcagggtagacagcacgcatgccagtttccagatggtttctcctttgaggtgctgtcaacattctttgtaaaactgctgctatcttccttatgaattgaaatactttttaaagcatcatgagataagattgtatggtttgaaaatctttgggcttccactattccttctatttataaggcttatatctcagtgcttgagtcttgcatgaagccttacctctactattgcaaatcccgtgtctctaaagagaaactcagccaggctggttggcactcaacaggaacaccaaaccttcccattgtttattctggcatccgtctgctctgactgggcagagctgacactgggcagatctgagttagaattgtgaatatattagcccttaaactgacacataggaatgggaaatattctgctttcagatcatatcttcagttgcttgtgctcatttgcaaaatcaacaggattggcaacttggtaacaactactggcaaactacaaactagacttaccgaatcccttatgcaaataccagcataattattcagttctgaagaataaggaatgtataacactttggtgcatctaagggttagcccacccaggcaaatgaattagacttgtagtactttgatccactagctctgactcaaatttacttgccaaagccccatgcacttagcccactgaatgaggagctcaactatgatgtaatctgagatgagcacagtcttaaggatgtgaggggacaaacaggaactgattgtatcagaactgagctggttgtgtatgcaccacgatgcattagatggcacccttattttatgcctaagtagagttgattgcatcagcctcctggagaaatatctgaatccatccctgcaaagtttacttttgtgccacaaaagtattatgtgattattacaggaaaaaaaaatgtaacatggtgaaatgaaaaaacaaacaaacaaaagagcaacctctaaatctttccctaatacttttatcctgaaatgtataagtgtagctgtctctgcctctgtcatctttatattttaaatagctttaaaatgcctactgctttaggcttttttaaagcctaaagtgggggtggagtggggggcatgtatcttggaggaatgagttctgctatgagggtatcttagagcttgaagaaaatgtagcacacaccttacatcccagcactcaggaggcagaggcaggtggatctctgaattagaggccagcctggtttacagagtgagttccaggacagccagggctacccagagaaaccctgtcttgaaaaatagaaacaaaccaaaccacaaactgtcatgaactggttatatttccaggccaagtcattttgagtctctttcagctttctctattggaagtgcttgatgaatggaatgacatttacaaaggcgtacagttgagctaagatgaggagtcgtcttcatctggcagtatcattacattcaataaacaagaggcttgttgcagtagcaaatgtatgcctccaaaccttagttgcttaacatgtaaatgtttatttcttgttttgaaaagcacatgcctggtctggtgagtttgtttattccatgtaagacccgacacctgggatgcatggcaattaagtttacagtggtgtaggaagagaaactaacagaccagaattcacacctcctcctaaacacctcagtgtcattcatttcctttagcctagaagtgccatatgtcactgacacccacaacccacagctcatcagtctgtaactaccagggggagagcattgctttgccatatgtttatgaacaggtgaagaaccagatttgaatgagtttggcaagttaccacagtgaccacaagcaagtgactttcagttgcctcttggttgactgtgtggcttaggtgacctcaaatccctacctcttcttagaaccccagagtctaaatgtttgatttcttcttatagtggctttgggacttaccttacattgcctacattagctcgttgtgactttgagattctcatatgtattaagaatataagatacatgctcacgttgcatagtgaaactgagagctcaccagaggaccaaagatagataatcttgtctcagaatctagtttggctgtttgaccttcagttgtttattttccctgtgatagttttgttactgtttatttgatttttaatttaaatataaactgagtatagaaataatattatcctcacagaggtaatttatagaataatcttggaacattgcctagcatgtactgagttcactaagttcattttacagtgatttttacaggtgactctccttgtacagtagctttgtaaatgtctacatataaggtctcaatgggcagtgactgttttaattattgtctgtctcattttggttaggtatgccaacccaacccatgcaaatctctaatatactgacccataaaatggagttatgtacgttgtgtgtaggagacttgggactgaagctcagcaccttagatctgtgctccataagctttagccaggatcttccctggccgcatcttggctccaacatctgagatggatcctgcctttgtcctcttcaggctccagattcctgtctggctcccctgctcgggctttcactcatagactgatgtggttgttaaacatttagggatccaacttaggtagggaattctaactctaatcttaattactccagattcaaggcccacctcagtttctggttaacaaaggagcttagtgatagacaagtatctgatgatgaccttttaatctcattagctgtacctctccagccttggggttttacatgccatcttgcccttaccactctctgaaatccacgagcaatctgcagggaaaagtccctctgcaggcatagtttctccaggagatccatacaagcaagactgttttcctccattgcccaagaatcttacaggagctggccttggaatgtagagaaacagccacaccaagagagactgtaagaaatggtgtgtggttcctgaagaggagctatgatgactaactttgattgtcagctcgattccatgagaaattcctagggcattagtgaggtacacctttgggcctttctgtgagacactttttctaaagaggattaattcaggaggggagatccaccctgcgtaggcagcatcatgccatggactggggaccagaatgaacaaggagaaaacaggaaccggccaggtgagtgctgccattccttacactcactctcggctgcttattccagctgtctctgctgccatggcttccttgctaagacactgtacccttatcccgggaaccaaaataaatgcctcaagttgcttcttgttgggtggtcacagtaccatgaagtaacgaaacagacactggcaggctcccaatactgttcacttcttgatgaatctaatgaagggaggttgggcagggaatctgtgcatggctgcagatgggtatgctctaggcaagtaagtgggtgtttctcactgggtgcatcttatcctcaggtctctttctgcttagtacacaaaagtcagcacaaaaaggctggagttgccttccaccaaccccctgttcagcctccattgtgtctcttagaaaaaagtgttgtttgagtccagccagttctggatactgtcaggctctcttgtgagtctccttttttcaagttgtatcaaaagacaatgtggtgcttttcccatagacccacagtcgggaacgggagctgctgagctgccgagatttatgtcgtgggcaagagttatatgaaaagatactgttgccctgtctctgaaatgatgataaatgcagctgttgcctgttttctccccatctgcttttgtaatcttgtatggcaaacatgtcacatttgtcactgacaaaatgaaataaattcttatctgtggttctggagaaggataaatcaccagagaataatttccaaacactctggaaaaggttatgcagatctccagtgctgatcacaagcgcagatgtggtgaggttctgcgattccaattttatctcctctccctgggcagcttatcaaagctcaatagggagatctttggaatctagcatgagacacaggctaagaaaagatatctgtgctggagggctttaaatgcacaagaatctacccctcttagcattcacataatataacaactggcgtttggttataaaaattagcaaagaactttaaaaaatgcattatcctatgatgttttaacaagatgcactcttgttgggttattttctataaaggaaaaataaatcccagagtgattaaagaaaccgatagtaaccatcagattcaagtcccagcacttcccacgtcctacatgccccccccccaccccgtatctttttcctttgcatccaaggcagggctgaagtcagcggggagactccccagcaacactgctcttttgtctcctttggcaaagctggaggctgctcagcacctactggtgtctttagaggagtgcattggcttggtgagttttctaggtcggttagtgtgttctttcaggttctatgccttctgttccttggcactggggttgtcattgggtctctgctcagggacttgagcttcccactgcatggtataatgtccagactcactgtaggacaagtgtagcttgtgtccttaaatgagataatccaaattacagactgaaatagcagagatttcacttacagatcaaggctaaacggagacaggtgaaaaggtgaatctataacctataatgttttgggactcaaagcaattttttccccattcctttgcagtatctgtgagttggtaatataccacaatgtcagcccatccactctgtgtatttaaaaatcaatgtctcttatgaaaacttactgtgtcaaactgctcatcattttacgttttaaagattagcccagagtgtctgggaatgtggttcagttggtaaaatgcatgctgtgcaagcatgaggacctaagtggagtctccaacatgcacttaaaaggctaggcatggtgctgtgtacctgtaaacctgctgttagggttgttgagataggcttgctggccagttaaagctgcctaatccatgagactcaggtcccagtaagaaaccctgtctcaaaaaacaaagtggttgatttctgagaaatgatatacatttctcagatccctgcctacacacagatacacacctctgcactgaacatacacatacatcgtacgacaactctcaaatgttcccagaaactgtttaacatgcacagaatctccttctttgaatgcagaccctttccaaagcgtggaaggtccaacacttgctcttatgatgccgagattgaacaggttcttagtgggggcgtttcagagacacctccagggcgcctagaaagaaaggaatttttgtatggctgtgataactttagaatcactgcgtaggctaaagtccaagagttaaggctgagcttttggacccagcttaacctttagagtttagctgctcagagatagaccatgtgggtcagagtggtggaatgaggaagcagcctggcagctgccagcaaatccatgttgccatgagacagagcagtaagaaacatgctccagccccctgtgtctctccaagtggctcaatcctgattcgaagtgtcatatcagtgcatgtgtcaggcaggtcctaacctacattggcattataggcaggtgggcattcagcatctgggactggaatgggaattgagtgaaaccttccatttcatctggcattatctgaaacctgcctgccctgccaactggcacatcatagaacaaagcttgtttctcatggctctgtcctatctacccacccatccaccccttcacctacccacccacccatccacccacccacccatccatccaaattatgcttttttgtttggtttcttctattctctttaaaaatatctgtttcagaatgtattttaggacaacagctacaacaaatttcttcaagaaatataactacaacaccattaccacactaacattttaacaagaattctttagtagcttctaaggcctagacagtattcagttctttccaattgcctcagaactttctcttaatcagattccaaatggcattggcttggggcctataatatccaatgtggctccaactcttgggttctttcactttgtgttatctgccccccttcttctcccttccttcttgctaccatccaggcattcttgctcttctctctcacagccccactggttccttccactcttgctgtccctcctttctcctcttctacattaatttaaaccagctcaccattcagtttccagcagcctgggttcatcttgctgactcagcacatcgggtctatcacgctttcacttgtcttttcacgttttctataaaacagatttaaaggctcatccaatctaagtttaacttaatggtaaaaatttggggagtacgttttgaacatcacccagagacttgacagatctctgtgttgagtcttttgcatgtcctccccatttcttagatggtgagaaaatgtctttcaccagttattgactcttcctgggatgattcctatagaaaaaaaacagcatggattcttaaatttctgacccccctcccccgcattgttattattattattgttgttgtttgctctcagccattagaaaggcaaattagttcctcagggtcttttcaaaaatgatggattgatagtaatgctaaatctctgtagctatagaacagtgaggaaacactatggattataatagttatgtctgactgatcagagagctcccaacaggataatgacgaagaagtggaaatgctatcctgatttgattagtatacatgaattgaaatgacatattgtactttataaataaggacaattattacgttaatcacaaaaacttttaaaaattaaatgaggtgaaaatgctaaccacctttatgagatcatagattcagacatatttgtttcttttacaactaattatctaattaccaatctttgattaggaacattttttagttcttttgacacatttctaataatcttgatgtctttcttgaattctgatataacaaaatattatagatatactttgggtaattcctgtccctgtgtctccaagggtatttggtttctttggcaagaaatgatataaaggacaatacagactgaatctagaagtaatgcaggttttagttattctaagagttaataaaaggctatggctgtctgcatcatgcccttttgaatcccagaaatgatagacgtaagtaaaatgttaagaaaatttgggacccagagaaatggttcagttgtgaagagtgcttgatgcttttctaaaggactagagttcagttcccagcatgctcatcaggttgctcacctgtaattccagttccatgaaatatggcatggtcttctggtctccactggcacttgtgcacatgttgtgtatacacagacacacacacacagacacacagacacacacacacacacacacacacacacacacacagacacacacacacagacacaaataaaaatcaatcttaaaaaaaagaaattcgtgatgctaatgattatggtttaggacttagggctgtaggagaaactctttcccaatgtgggcctattttcctccagtttactccttactggatcattcctctagtggttacaatgtgtgagcactaagagttatcagtagtctgcattctgaggctcctttgtcctccagccttgaacctgccctgctggctgacagaaagccccatatcggggtgggggtgcacatacccctaagagtatgatccatgctggaccagttagatgccgtcttttaggactcaaagaccaaggaaagagcatagtgccctaaagcaactggaaagcacacgtctcagtggctatgctctgccaagacagttggttctggagccccttctgtgacacgtgcctgtcatccctcctcagaagccacatgtctcctccctgtcttcctgctgccctgggttatctatatctattacctttaagagttttaacctagatgtgacaattaagaaaataaaaacctggtttgctgccatgacttaaactcttccccttggcagtagcagaacagcattaagatgcatcacttaacgacctgtcaaaggcatttacttgtaattctagagaccactgtcttctctaactctgcaaaggataaggcagtctacaagctacttcctaggcctgagtttactaggagaaaaggggaaccaagcagcagggtgagcctatttctgctgcatttgccttttgcaggtcattgcttagcttgcctataagacagtttctaaggagaggaaaaacagtgcctcttttctttgcaaaagtgatacagggctactacagaaaccaccaagagatgaaaattgcaaagaagctatctttaataatcaatcacttctgttttgctatttgttcttatgtctgtttgatctttatcatgtacttgaaaccgcttaatatttggtaatgttttcatgtcattggaacctctcagttcatttgtcatataatactatcacattcgtcactcttttaagataggctcttgcaacgtatctcagactggtctctaaagcttggtgtgcagcgctgtaccttgcctccaatataattttgaatgtctatattatttatgaaccttctttaatttggactttacattttactacaagtgcctggaaaccctataaattaaaatcactactttattctgaaatgggtataaacatccctcagtggttcccacagcccacacccatgtccaacaacattcattttctcccagatcacaggttgaataaatacagcagataaatatttttaacgatgtgggttgcagggctgccgcagaacttgtcatactggaagagttgcattaagattgaaatgaccttcagtctcacaggcctgctgcagcgtcggcctccagtggcaggcaggttcaggagagtgtgcgtgtaagctttctttaatcaatgtcctttagtcacatccttctgtggaggtcacaggtatgctaatgagaaccttattgctcccggacttgactatggaatctttcctcagtagatttgaaaacagatccaggaaatcagcctcacaacctgcagggacaaggaatgagattctgaatggacatttgttctcctgggaggtgaacactgctttgattcacagaatcaggtaagaatgactttttttcccttttttttttttttaatggagagagatggaaaaggaatcatagctcattttattatctaaggcctaggtaaagtctggcagtttctcctcactttcatagttttggaagcccatttgtatctaattgttaatttttgcatagttgtctccttgaaaaacagatctttgggttgcacagatgtgacagatagctggccttgctggattctgactgatcaagagagccgttatgaaatctagaatcatttaagaccctgtgaggtgcagtaccttatggtttattggcattctgaagacagaccagacattttgccttaatgttggatttgagattttattaatcagtgttagtaatatacagtgctaatacaaattttgatttcctgaaagagggtgataaagtcagttgaagcagtctaaaaagaatggcaatatattagcagcattcttggtagatagatagagtagggaagcataggaggtagatcattctggaccaagtaagagcttaaatcaagtgagttctcactttgtagagagggctgataatgtaaaactaaccagcacacacatatatgcacacataaacactaacacacacatgttcatctgtgtttcatagacaaactttgaccaatgtcaaagttttgatgccctagggtttcaatggccagttgttcttcatcttggctcagaaagcacctagaaatggctttttaaaaggctatttaagttttcatatttattttgttaatattgtatatgtatgtatcatagacatattatttatattatgttagatgtataatagataatatattatcaattattacatattatttatatattatatattaattaaatttttttaaaaaaagctttaagcaagtattaagtataatgggcttcaagtctgccactgaaacagcagctagtagtgggtaaatctccttaagttcagaggtccagaggtccagaggtacgttttagatgtgttttctgattcttaagattgatgaagggacttgggaccaaagcaaagacctaactagccttctcctagaactgaggtgaccctgccattggtgttgagagtgatcatagtttcagtaaagaaggagagaacagcttcccaataataagatgtgtttctgtctttttgtcctttcccagatctatccaactcagatatttatgtttttaagttgatttttcacctctaagcctaaggattgcaaaatctactgcttaaaggaaccaggaagcaatttcgatggattaggcccatgggcagggattagcagggagagagtacctggcacacctaaaggcagcagttgctgacatattttggaaaccacatttgggtaaaatgccaactttggtatttataggtgtaaattctgtcttagcagaatctgacaatgatatcatttagtttatcatctagaataaatcaaatgaaaaccttgtctgggcttcactgaatgcatcgatctcttgtcattttaaaataacaagagaaactctcaggtgagaagtgtcttagccagaaactaatttggaggttaagtcctgggagttccatcccatatgactgcttgagtttcctaaagcacaggttaagaaaacaggttcccagctggagatggctcagtgattaagagtgcttgtctcttttgcagaagcccttgattgggtttctagcacccacacatggtggctcacagccatccttaactccccttgtgaggaattgacttttgacctccttgggaaccaggctcacatgtgttacatatacaaacatgctggcaaaacactcacacatataaaataaataaatcaaccccccaaatttttaatgaagatttgctccaaaaaatctcatctgggtttgtaataactctttagcatttaaccccaagagtagggcagtttttgctgcattgaaacatattgataaagactatcatttaagcacttgaattccatctcaggggacaaaagaggtaatacagacagcatagcatctcattttatggaattctgtagcatggatactaaggtgatcaccatatatctgtggtcgtatatctaaggtttccctctcgggaagtaaaagacctcaacttggtagttaaacttcagaaattcatcttaaaacaccaggttttatttcttctcattatatcatagaggattctcactaccgaaagtcaccttgggtgatgataaattatttcaaaggaaatggtaaagtagtaacctgtctggaacacaggagttgcaagctatgtgacatctattttgatcaccaaaagagagatttttcactcattcctggcttgagctaccaagctcttttcttgtaccaggaagtaagtgaaggtgacatcagagtttcaacagtaattcattgggatttatctccatctggataagataatgttattgtaaatttagctgggagtggtggtacattccttctatctcagtacttgtgaggcagaggcaaatagatctctgtgagtttaaggccagcctggtcaaaataaacagaccctgactctataaataaacaaatagtttaaactgtttcatgtagctgagtgttttgcatgcatgtctgccttactttcatgcctagtgcctggagaaaccacaaggggtcttaggtctgctaggactggggttgcagatggctgtgagctccatgtgggtgcccacaatcaacctggaccatctggcagagccgccaatattcttaaccactatgccacttctctagtccttggacaagatgcttttacttggtcctaaacacagatctaagctagccagcctcctgcaatgtacaagcaatgtgttgcatatcagtcacactgtggacagaagcactcttagcccagactcgagtataagctcataaatggtatcattgccacaaacaaaagaggtatggtatggccaaggaatgcaaatggatttttcttcaaatatcagtgttaaatcacaggagtggttgccaagaggatcatagtgctgagaaagatttggaaaccatatgcaggctttccaaaagagtacttttacatattggtcttggtttctaaggacttgggacatggagccagaggtaagtgtgttctgtgcttgccgtcttggcatagtctactgaaacagaagggctatgatcaagtagtctggggcagcttgaaacatgtgcccactaatctgtgatttctttttctcttgtgtttcttgttccatctctgttttgtcttaggagaaatggcaaagcgtaccttctccaccttggaggcattcctcattttccttctggtaatgatgacagccatcacagtggcccttctcaccctcttgttcgtcaccagtgggaccatcgaaaacaacaaaggcaagtgtcttgggctcttctggatatcattccagggcctgttggatatttgttgattgatgggcagcacctagatgagaaatagtgtctttctgcttcagctgtctgtgagcagcctgatacgtatctcccactgcactacttgcagtttctgcaatgatagcgcttttatcacatttacctttgtccacaaatagccagataacaaacagatatacaagtcctcttagcttttctgttgatgtactcagagttcaaggttcttctaagtctagtaagttcaccttttgctgctaggccttcaatctttacctgcctgttggttggagtactcttctactgggaggaaagtagacaacaatgaaaatcaaacaaaccccctaaaacggtaaaggcaggttttcagcctcaatccttacaagggccagtctttcggtaaacaaagtacaccttatcatgatatcatatcatcttaactcacccaagtttttgagaggagatagaaattgtgccatttagatattgtctgattttcttattgaaatgttggaagcaagcttggcttctgactgtgatgtaagctgcagatccaggtgatactatcattgggtcattgacagagcctctgtttcagggcaaagatacaaggctgtgaactgaatagagcagatagatgagggctgagtgtttggatcaaatgtgtgtgtgtgtgtgtgtgtgtgtgtgtgtgtgtgtgtgtgtgagagagagagagagagagagagagagagagagagagagagagagagagagagagatgcactggccttaggtaaagtagcaaaggagctggtagttttcttagtattcccatttgtagtctctttttttccagtttgtgccttgccacatttcagtgctgcgaattctctaaaacccaaaggaggaatggttctctgttgcagtaggcaaagtagactcttggactgctagaagttaaatcatccttaggatttactattgctcattcaatatagctcctaaaattagagagtaagatggagctcaagaggttatagaagtcacagtatattttcataggaatggctactggttatttatttacttatttagtgtgtttgtgtgttttggtgttggtgtactggtttagtggtgcagtttaataagaattccatatatttttttcatctaattttcataaaactcttataaagttctagtgttgatgccattttacgcattgaaacaccaagattgtaaagagcttgctctccatatgaggcttggccttagtttttgtatcatattttgatgttagtagcaatgcagcaaaagcaaaaataatgcttttctccctgtaatatctgatgctgtgcaggagacatgtgtgtttgtaactctgagatgcagctgcaggaatatcagaacctgatttgaggctgattggggaccggattcatcacatgttctttacgaagtcttagttatgtcacgtctccaagtttcagggttcttgttaataaacttgaggatattatgttaccagagttgggagggtctgaggctgggccctggaaacaccatcaagctatgcttggctattcatccttaatgggccaattaaagagacaaacaaagtcacagcaaagagcataaaaagatttattcaatatggccactgtggaaagaggaacaaagagggtcagtgaccccctccctcccaagtccacctgacatgaggtttagtttgaaatagaaggaaagcagtatgtggaactgcttggtttcatatcctggtctcagttcgtctcttctggaaggtactttgacaagttgtcaggacaatgtgagatcttgttctagcagataagcttctgtcccacccctggctggcaccacattcccgtgcttttcctctttaaagcatgacatttctggggagattccaatgtcttgggatccattgtttcagtagctaatagccacagggaaggatgcaagcatctcttaggaatgtcatcattgggtcaggtcagttacagttgagctgttgatctctgaaattgtagttccaaagttctggaatctcagaagaagccagacatcagtctcttctctaacttcttcttaccaccagtgactgtgacaatgacatttgatgctgtgtatactcctggctactggtagaaaaacaattgagcaaatgtatataaaagatgtccaactggaaagaaaaatcaaagctagacagcatcaccggtctaactctttaatgtgtagtcacaaagttgtgcagtagcacaaagctatacctggaagcatgttaacctgttcttactatagatgagaaactcagagagaattagattgggtgatctgttttgctgatagctggtagaattagatttcaaaccaagaagtttgtttctggcacttgccttttaatatctatattattttgcatcttctgatattcttaattccacatttggtgtggaatatatttttgttaacacacacacacacacacacacacaaatattagaataatcaaactgaggtggaattatggcacaccataataagctggtgacacacagcttcaatcccagcctatagaaggccaagacaggaagatctttaagtccaaagccttcttgaaatacataatgagttactgtcttaaatagatgaaccaatccaaagccaaagaaaactaaaaatgagagacaatattaaaagttttccttaggaacttgaaactacgtcttcttctaattgctgccaggaagtaagtgggataatgtgttgtttctcaactatcatgttctgtttttagattcaggaaatcatgggtcttcaaccaccttgagtcccacaaccacccagacttctccgattacacaagctccagaccctcctccatttcagaacttcagtggctactacattggcgttgggcgagctgattgcacaggacaagtatcagatatcaatttggtaggtaaatgtctgtctgggctctctaaataggatatgaaacaattaatgttattatttgatatccttcattctggattacttcataatcatttctagcttttgtgttgacattgctgctatccagcactaagaatattatcctataaagaaaaccaattttggctggccggtggtggcacatgcctttaatcccagcatgtgggaggcagaggcagggggatctctgtgagttcgagaccagcctggtctacaagagctagttcaggacagtctccaaagccacagagaaaccctgtctcgaaaaacaaaaaaacaaacaaaaaaaaaaacaaaaaaaaaaacaaaaaaaaataccaaaaacaaacaaaaaagaaaaccaattttaaagttcagttacaagacctgttttttcctttacttttattgattctttgtggatttcacatcatgcattctgatcccacttgcctccctgttccttggcatctgccctctgccctcacaacaacaaaatcaaatttaaaagaaaaataaaaaacaaaacaaagaatccaaaccaaaatgaacaaaacaagacagaagaatcttgtggaaactgtagtgtggcctgttgagacacagtttaccgtctagatcattcatctttacttgtaagtgttcattaccaagagccatttgtctggcttgaggcctcaggtttctgctacaccatcaataacggcctctcactgggtgctccccttggatatcctgttgttgccctgtatcatagagattcttctattttggatctgtaggtttgtccaatgttggatgttggggtgggccaactcatggccctggttctgggcctggatggtagctgggttggtcagctgtttaacttttcttcattgtcactacctggatgagctctccagcactgcccaggctagctcacctaatgcagcctgcagcaaggagcaaggccagttccactgctctgagccctcagagccaggagcccctcactcatatcgccaggtccagctctactgttttgcccaggcaaggtacagggccttttctgctgattgctgtagggatatatgaggtggagaatgggatcatctatcctgctctcaatgccctcaggattggctcactcaccaccctgaacaacatggtcagctctagtgtgctgcccaggtgggtgcggggcccactctcccgtgtgctgtagctggtgaagagctggctagttctttattctcctgctcttagggctagttctctctcttgccacaggtagcaaggggtagagaggagtcagctctagtgtgctgctcagataagaagcagaggcagctttctcatgcactgcagctagttagggtcagagccagctctcctacttctgtgaccccaggaccagctctctcacctgctgcaggtggtattgggcaggggaaagggtatcttttcctcaccatgccaccacatggcagactagggggagctgggtcagctcctctgctttcatgccctcagggatggctcacctatgtccctgaccacagggtcagctctagcatgcttcccaggtgaggtgtacacctatggtgaggggtgaggtcatctttccagtgggggaagggggtgaggagtgggtgctacaccctgaggggtagggccagcttacctgtggcaacattcagtgagaggcaggatcagccattccagggccagtgaagggtggggctggctcagcacagcattgtttcattggctggcatgctaccacgggccatggatatcaccatagaacccagctacagcagagccagatatggctctcggtccagatgccacaatggcccctgtggcagcatagctctggcagcaccgtgacccctgggtatcaacatggtcccaggttactggctagaccctgggcatccacaaagtctttagtggcaattgaagccacgaacaatgccacagaccctggtctctgcaaggccatagccccagacacggccctagtcagcagctgtgcccagaactcaccatgtagaccagagtggccttgaactcatacacatccccctgcctttgctacctaagtgttggaatagaaggcgtgatagcatagagaaagacagttaaaactgtaaatggaggataggccagtatcaagcacttctgtgagtttgaggcagcctattgcctgcagtataccaatgatggaaatacccactcacctcactgcttgccttggaaacaagagcaagaagttgtctgctggaagttgctcccttctaacaaataatctttatactctatggattatactcagctgtctgttctgagagtaaccctgatctgtgaactctcaatgaacactcttctctcatgagtgggaagacaacgagtagaggtggccattggaagacctgggtgtagttttaatgggtggcttcaatgagatggtgagagaagggtcatagaatgcatgatcttacttggcttagtctagagaatgatgaactgggaaaaagctgagtgagggtggaggaggggcaagcactgccttccttataaaaccttagaagaaaagcttcccaccaaaggcttgcaaagtcctgggggtacagctatctgcttactcttcacagagaaggcctgccggtctgttcagtactctatcatgattttgtcttcattacatttttgtaaacacacacacacacacacacacacacacacacacacacacacacacaatcttactgagccagagtcatggtggttttctctttgtgcgcctgagcagtctcttccagtactgtggtgcctggctcctggagaagttcagtgcctttctttcttttttagatggggtatggcaaacgtggccagaatgcacggggcctcctcaccaggctatatagccgcgctttcatcttggtggagccagatgggtcaaatcgaatggcgtttgtcagtgttgaactaggcatgatttcccaacgactcaggctggaggtgagtgatgaaatggggggctggaaagcagcctgtgggtgcccacaatgggaactcctcatgcttgccttcttaactaaagagcatctcctaccttcaatgcaaagtcttgacagtgtcgcaaacaatcatataggcagatgctcttcgttattatggtctaagtgtttcttttcaaaacttgttttcagttatgctggtggctcatcattgttatgaatgcaatgttctctgaaaacttgttatgcacaactcacatggattctcacttagccatccttgtcaggtgtctcagagcactcacgggtcactgacctccccaagttctcacacaactgagaatacatataagccatcatttgtggactgaaattcagctttgcaatgaagttgactaccaaatggtaatggaagaaaataggtgatgtcacatggagggcttgttatgccagactggttattgttggatgagttgggaaattgctttcgtcgtttaaagaatcttaatccttaaactactgtagaatgtggtaggattttgttggatttccccctggatttacagattgttacttacctgtgtagacagttgaggttagcagagaggtatctaaagggtccttaaggaacagagaaagaagaagaagaaacaggagagaggatgccagacaggaaaggaaggagggggagaatccagtggtgtcacgggttccttgtcagtctccgaagatagtttcaaattcctggcccagagctactttctatgtaaattcagatccagtagtgactatgacctgggagtgtttgcacagattcacaagcatgagagagagagagagagagagagagagagagagagagagagagagagagagagagagagagaaaggcgtaatgctgaccagggcagtgaccaggtgtcagtcatacaggcttgctctctgtcactttctcttgttcagtgctctgctcctgtgctgtgtggagtgggcagtgatgacacagcctacaggcaccatctgatattggcactcttggagtatagtggaagcctctttcgtgagcagacaggaggagggagttaagtattttcctccctcctacactaacaataaaactctgaattggctctgttgttatccccagatagaattttaaagaaattaaggcagttattagcaaatggcagagctgggttatgaaaaaactacacttttaaaaagagacattaaccccagtccctttgtctgagatagcccttgtgtagctggtgtgggtcacaaagtcactgtatagctaatgataactttgaacttatgatttttctgcctctgcatcctgagtgccaggattacttttggttggtttatgtggtgctggggcttgaacataggacttctgtatacttgacaagtactccactcaactaagaaagacatcattcttctagagagaaaattgccccaatcacccacttttttttttaaaaaagtattttgctagtacttgcaaaggacacaactaaaggaatcacaactaatggccaccatctagttgagtcttagggggaaatgactataacagaagcacacagataaccataaccactggagtacagttttctagtagttacgtttttctatataatattttatccaaaacacagtgtcctaaaacaataaatatttagtatcttacttgctctgtggaactggaactcagggctatcttagctacatagttctggcttggggtctcttgcaattatgaggatggcaaagaacagatacacagaggcttgactgaggaggcaagatccatgtgcgagatgcttgttgtcaggaagcttcaggtctccactcaactcctcttgagttcttccaaggtggaagtcagtgattttctgacccattttcagaagttacacacaattacccagttttgttcatcaaacaagtctagccacgcttaaagttaggaaaatgaagctttggtactatgttttgttttgtttcagggcagggtctcactatattgcttaggattattcagttcatactcgacacttcctgcctcctgccccaaacccccatgttctgggattgtagacccttgccactatgctcagataggcttcactttttgaaggaggtagcatgaaagaatttagggacccacagtcttttaagactctcataaggagacaaggatatatataaggaaaatgagaatcaggaaaggattttcatagtagaagtaatacttgagtgtgcagaattctaaatgtttaaattgcagagggagttggttggatttttgtcaatgggacattagcttgggttatctggaaagagggggagccgaactgaggaattgtctccatctgattggtcctcaaatatgtgggagcattttctagattaatgattgatgagggtgggggaacctactgtgagaagcaccatccctgggcagatggtcctggattatataaaataacaggccaagtaatctgtgggggatcagggagcaagcccctgtaagcagtgatcttccatggcctctgcttctgttcctgccttcaggttcctgccttgagttcttcccttgatagtgcagtgaaactttaagctaaacaaacaaacaaaaaacctgtttcccactccacaagttgcttttggtcaccgtgttttatcatagcaacagaagacaaactagaatatggagagaccaaatgtaagggacagaataaatgaagagttgtaaaggagggatatagatgtcttctggagggaacagaagaaatccataggaaatatggagtcatatatgtataagagatgtacctagatggttcattggtcggaactatagagaaccagggatgctagattgattttaattatgtgagtaatgtggaatcttaggaaatgtttgggtggagtaatgtcaatagttttactgaggatgtttaattagacagggatgcttcctctgggttggaatgaaggagaactaaagggaaatcatagattagtaatgatttaacatggagactcaatggtgagagcccaggtaggaaaacagtagttatactgggtatgtccaaaagaaaatgtttaaagctatggagttttagaaggtgctagacagccgaaagggaagttagggctttgggaaaggttgtcaatctcttcctggcaattttctctctatgagactggtcttaatccaatggcgtgagagtgagactacaaggtggtaggatgtgaagataaatactgtgacatgtggggctaaatggaataaactctaacctagcacgcatggtgagccagctaccttcagaataatccataggtattaacagccctccaactctttaaaggagctgttattattatgggattagaaagacagagaaaccaagttgcagagggtaaagtagcttatccaaggttatgtggtgaggaattgtcagagctaggatccaaagttaggcattcccatgccacaggccgtgctcattaccaccataccacacggcttgtctgaggaatcagagatggctaccattggcaatggcagggtcctgatcaaaagccaggcactggagatgaggaaggagtgcagagagatggtgggtgggattctagatgctcttaggtcaatagtggcctcagtttaaccacctctttctgttttcgctctccttgcactgtgaggcccaggggggaggcctttatacccacccactcagttttcacaagtcgggccaaggaaagagagaagaaaagtaaaacagttaagtacatgaattaagcagatttatgatgtggggttttagtcaggtctcctctcagctctaagactgtggaatgaagatagggataatatgggaacagtgaggaggggcaggaaaacagaatgcctttctccccattttgatcatgctccccagagggctggcagtggagcggaatagaaggggaagatgaagaagtgagcaatggacaggactgtaactgctttgttctgggcaaacagccttcccttcttgaaagtggaacacgactgtctatagcagttatttgcaggtatggctagcatgccagtatttaatttcttttgccttaaatctctatcagaggttgtggtttaagatatcggtgagttcttcattgttctaaaatccaagtttcatgattgctgtctttcctaagaacccaacacgtcgtagcatcaaggaatggatttaattctacaaattctaagttggagttcattagggaggaaatgagtggcgtggggagctttaaactggactttcactcttcatcttttcccactttcttgtcctcgtggagaactgtgagaacatcggcctttggctttaactcagctccatggtggtgattcattggtcctcttcccctctgataaagttttcttctcaatgagtgtggtagtttactgcctagaggaatgtgtgggagggatggggcctctgcactagagttaaagtcaaacaaaagagacacagaaacttgctaggatggagctgaaggctacttggtcagagggctgtttattataacttgccattctctttccacagtacagtttaggtgaatacagcatattagatattagttagggttctctagaggaacagaacttataggatggatatatatatatatatatatatatatatatatatatatatatatagacacacacacacacaaacacacaaataagcacacaaacacacaaataagatgttattaaatcatcttcctttgaaacagtaacaacagtttctcacagccgagagaggctgagaacctggtgatcacagggtccccgaggcagactgcctcagcaatgggaggcgctagtcccacaatagctgtctcataatagagaggttgagaacttggtaggatcagcagtctcaatctgttactgaagtcctgtacagttctgggagagccactagtgctcagtcaatgatggaaacctggaaacacaggttctagcattaatagaggaatgtgtagcagcagcaaacagggttaattaattcagcagtgaaggtaaaaggtgaaaattttccctggctgggatgctatccaaaggtttgctcacatttgctgtagctctttccatataaattaaggcaattaagacaatccctcaactgaggatccttcaggtaattatgtcttctccttggcctccttcttctttagatttactttattttgcatgaatgagtgtttacctgtatatatgtatgtgtaccatatgtgtgcagttcctacaaaggccagaagagggcataagctctcctggaactggagttatagacagttatgagcagccatgtggattctgggacctgaaccagggtcctctgcaagagtagcaagtgctcttaaccacggagccatctctccagccctctatccaggcaattcgattttgtggcaagttgacattaaaatcagccatcatgcatggtaaccttgggggcagtaatagattaacgaggcaaaatactttatatgatcttctgttttgcttcaatgaccaccaaagtggagcaagactgatagagctccttagttaaagaagcagaagagagcaaactgacatctctgcaggttaaatacatcatagcatatcagcttctacccacattagaccaatggtatgctgaaattggattgcactagttcatgagaggtactgctaatggttgctctgtgattgatactttaaaaaattattattcactctttaaaattttatcattaattaatcaattaatttttcccacagcttcctctcccccttctcctcccatccctcccccccccacactcccattcactccttctccctttccttcagaaaagttcaggccttccaggcatatcatccagtcatgggaaatcaagtggcagtaagactaggcaccttgtctcctgttgaggctggatgaggcaacccagcagtgattgacagctttatggtatcattttaaagaaatgacaccgagaagtaacagtactagtgaatgtcagattgcagatgattaagcaggatcgtaattagctactcagcagcattactatttttttctatatttgctgtgtgtgcgtgcaagggtgtatgtatttacatatccatatgtgtgtgttcatcgagtgactaatgtaacaaacatttactaaggttcctttatctactgctcaacagtgaaattccaaaacctagtggctcaagtcagtactgatctggtctgagtgcagtgcgtttctatgtgtttaaaagccctgaatggcagggctactcactcatgtgtctagcatattagtgttgacaggatggttccttcctatgtgagtcctcctccagattcctggggtgacctcacacacggtaggtggtttcctatagaccaacaagtacgacagtctgtgtcagagaacagaggattcttcatcttgcaaagtgaggctgtggaagtcttttcagagttggtcccccgtgtctgggatgcttttccgggaggtaacataagcagggtggtgatatattatttatgatttattaaagcttgcctgaggattcagaaagcaaagtcagccacaggccataaaagcccttcacacacctttaatcccagcagtcagaatctaggaggtgtggtacgcacctttaatcctaggactcagaggtagatggatctctgtgagtccaaggccacccaggaatacacagattgaatcagtctaaaagagtaacagatcacatgcctttaaccccagtgctagagggctataaaagatagaagcagggtcttcagcattcattctccagccacgctgaagatagggcattcgttcccagccacactgaggagaggcagcagtttgaggcttgatgaagagctcaggcatggatcaacattcagccagagatagtggtaagagctagtggatggctactttgcttttctgttctttatctcgaggtttgaaccccaatatcagtctctgggccttttattaattcatgttacaaagaagcttatttttttttttccatttaaacacctgcccaacaaagcctctcttcaggaagacccgtctttactctagtcaccattttcctttcccaacaatgctttcctgcatagagttcatcactgtgtgatctaacactaataattatttttgtatttctttttcattataataaaataccttcgaggttcaaacttactatatttctatctgtgagaaatactagattttgaaagaggaatagataagagttctggttagagagacttggacctggagtttggtccctgctactccttagattagcaggaaaattaacttttgtacatcagcattctcagttgaaaaaacgagattgataatagctactttgggggttgttatgagtattttaagtaatataatgtacataaattatttagttacaaaatgttagcgcctgctggcatcattgcacttgttactatgttgggcagcttggagggtgggaccacctgaaagggaagtgggcagggcagaccagcttttcagaatcctcttttctgctgagatgccatagttcttagttctgtgttttgcttcccttcaaggtcctgaagagactacagagtaaatatggctctctgtaccgaagagacaatgttatcctgagtggcactcacacacactcgggtccagcaggatttttccagtacacaatctatgtactagccagcgaagggttcagcaatcgaacttttcaatacttggtgtctggcatcgtgaaggtaggtgaagagctccccaccagcttcgctttaccattctcatggatatttcagaactggtttcgtgtaacacagagaaattccctggaggactgggggtccgagttcagttttggtacctacctctcttcgtctttcccggtgttaccagaggcccgtctgtctctttacagctcagaaactaatacgcaggaatgatagtgggagggaaagtggagaggaggatgctacaatctcctccccgaaaaggagagagagcaccttagggactcagctgtggcagggcttttaaagggagggaaaggaggcgctgtggggtggggccaatatgctggaaggccacatgctaaataagttggggctttgtcatccaggcatcccttgtggctagagaacctgctgcagatcttcaccttcctggatttgttgcaaatatgttacttttctgtaggttaaacagcacaatcattttcaagatttgtgttagtaagtacacagaattaacaacgataacaacaaaaggcagggttacctgaaggccattgggcatcctattgatgcaaaggaatatcctttagcagttaatttttttaatcctttaggcgtggcttttcagcaactaacactcactgttccatgaccctattcttttctcttttttttctccctctctttgcttcctcatattcgtcatcagtccctcccaattcttctcccattcctgacttgtgctctttaggcctctctagttgtcttctagcttaccgtcactacttgcgggagattcttgtcagtgtttttctttaattgttattgttgttaatattactattttttgcatttcaggcttagtcctctatttttttcacaaaattagttctacatgcagacatttagctgacaaaggcaggcttttctttacaacatttttatattgtgcttagaaatgtgttaagggtttatggaataaatgtcatggtttataaggaatattaattataaaagaacccagtagattgggatatacacactatataccttactgagagtatggtttgttttgcgaggctttattttagtatgtgtagctaatatatactaaattgtgataaaaatgtccccttcactgtggctcccagcgcacgcctttaatcccagcacctgggaggcagaggcaggcggatcccagcctggtctccagagcgtgtgccaggataggctccaaagctacacagagaaaccctgtctcgaaaaaccaaaccaaaccaaaccaaaccaaacaaaacaaaacaaaataaaaatgattgaaaacaaagaggatgatgggtttgagggaaagttgaatacttgtatgatgatacattttgttccaaaatagtaggagtcaactctcccaatctggccccacaatgtaaaatctttcatgacccagcagtccacagggcccaagagatggaactttttcaggatgtggtttataagtaccaaacatccttacccatagcacttcccttatttcaaccccaaaggctatttttgtttacctccagaaggatactggccctgtaattctccagcctttacctatagtgggggcccattagaaacaatggaggttggcagtgagctcttctgtttgtactgcttatcatctccacaaagatgcataaacttaccactccatttatttatttattttgaactttcagagcattgagatagcacacacgaatcttaaaccaggcaaaatctttgtcaacaaaggaaatgttgccaatgtgcagatcaaccgaagcccttcttcttaccttcagaacccaccgtcagagagagcgaggtgagcaggaaccatcaggataatgttactgtatcttcactggacagcagcaaaatctaagttgtggagtgtagtgtggtcccagaagagtattaaagaaatcaactctaacatgtttgtctcaggcaagaagaaacaagaaatgaatgtagagagagacatcaattcttttcatcatccctacacattgttgtctgcgggaaaccgtacaaagacttgaacgatggtgggctctgcagagagctatcattttctactgtgtagccttttgagacttctcacctaagtttgttgggtctcagtttcttggtctataaaatggagatttcaatgtgcaaagcacatcatttaataggcaatttttttctattattctatgccattttattgtgtgttgtccagaagcatcatcttagtctatctgagctgagcaaggaagggtgggagagaatcagagagagagagagagagagagagagagagagagagagagagagagagagaccagatataatacagatcataactaaatgcaacagccagtggatacgagggctctgtgtcttttagagtgacaagccaggcttttgaatgataagaagaagacacacatgggtactgtgacagtttacagtgacatctcagttctaccttgactgcttgacagcttccaaaggtacttgtttttagaagttataatctgatttcctttgaaaagatggagaattctgaagtttcaggtcttgactgaccttggtttaaatctctgtgtccttctgaagagagtccattgaaaattgatatgattagacatttcaaacacaaatcctgttttttaacagacacatccacattatatagtatcatgcatatggtataaaaatgtattttagcttcagttagttgatctagtgcctctaccactgatcataattgtaaactacttatttagctgagaatgaggtattagctgcagtgtagggttgctctttactgtggagttcactaagaggcattaaagtttatttgttgtttattattagtgtgtatgtacatgtgtgtgtatatgtgtgtgtatgtgtgttgaggacaatttctgggagctggttctgtccttttcccattatgagttctggagatcacagttaggtcttcaggcttgcctggatagaacctttatccagggtactggagtgggggagccttctcatccaggagcgggggagccttcccacccactcctattttgttaggttttgtgtctgcttctgttgttggtagaagattaaggtcagtctctgacataaattgacctagcttctttattttcctggcaggtattcttcaaacacagacaaggaaatgttactcttgaaaatggtagatttgaatggagaagacttgggccttatcaggtaatccaccctctttcttttcctccctctcttcgatctccttccctccctccctccccacctccctccctccctctagccctcatccctctcaccttccctccctctcttccttcccctatatgagtgtctttttataattacttggagaataaaaagagacttgatgagaggccccaagtcctgagaattaattgtgtagttagaagttcagccttggcatcaggcacaactgggttcagccatgagaccaaggatatggttctttgcctctaagggctgagcacatcacttgtaaattcattaatagaaggatgactcaggtgagggattttagtggaagtctcagcatatatgtatgtctctcatgatacaaagacccagtgaagtagttttgttttgattttcagggtgctagagatggagctcagagtcttatgcatgttagacttgctgaacccctttcctttaaggttgtgagaaaggatcttattatatagcgcaggctggcttgaacttgctgtgtagcccaggttggccatgaactagtcatcctcttacctcagcttggtgtattctaccatgagtgctggtgtattctaccatggctagcaagacagtaaatgttattgtttatcattttatcagtgtctaatatgtgaacttctgtggtgtgttttcctaaaaggataaagtttaatgaaggacaatgctcactaggtatagaagatgaactgacatcacctaaggctggagacgaggtaaaactgtagcttatcccagaatttgacaccgttatgtgatagggacatcatgcaggaaagaatagacctagtcttcttcaaagagaaggcatttgtcttcatatgccaatgtgtttactgcaattgaactgatctaggaagtgagtaggtggtctagcattggtctaaacaccttgacctttggacttaagagttacaaaaaaggccttaggaagtttctgggactgcttggtgctacggtcaaaagtcttgggttgcctctggattgtcatgttctcagctatgtgactttaaagacccattatgtaactgtcatattccaagcatactgtggactaaagtgagtccttcaatagactcaataagagataaaatagacaaatgacataagataaagatgatggtcagaactgttatattcattaaggaatgatgactgaattaatgaattgtgttcattaatgttacaaggcattgggggatatggcactgaattatctcaagaatatttcttttttttttttccaagacaggattcctctgtgtagttttggagcctgtcctggcactccctctgtagaccaggctggcctcaaactcacagagatttgtctgcttctgcctcccaagttgtgggactaaaggcatgtgtctcactaccaccaggctcaagaacatttcttgaactgaacttgaaaggagtcaaggatttctcagggagatttgaaaaacagtgagttgtgttacagtgtgtctccaggacagggtgtggaagggaactgagcttcccttctactggtgtagagcaaatcagtacaaactatttaggacaggactgacacaaaattgtacacctggaattagctttaccgagtagcccacaattggtgggcaaggggctttacctttactctttctatttagctcttggttgaatgatagaaatcatttacttcattccctcttactagttttggattattcagcaatggtatcaggcaattgaagcatctagctttggtgctgctttatatgttactgcattgcagatctggaagtcccagggtcaactgtcaagatcttagcaaaacttctctatctgctatgcttgatatcctgcagtaactcgccattgtttctgctgctaccatatgctcttcttgacctaactgtttcttcttcttgccacatggtgataactgtcctttgaatacattaacaatgttccaaaatagatatgagtcaaaatagacatagtcactcttctcataggacctgcagcccactgatgggaacagagggcttttaagtagcataaaatacacataaaatgattgggttaaacgctaggaattgcataattaaattaaaactggcttacatgtttagaaaggaatgggcatggagcttttgtaaggtgatttgactctgttagacagatgggagaatatttccctgaggcagtaacaatggaactgaaaattgaagactattagatgacaaaatggatgatgagaggaacattcagtgtgcacagagaagcacatactgttctgtttgaacaactgataggctatctgtgtgtcttcagaccagaggacaaagggacagggtgtgtgacacagactcacagattagatataaagtaaagtgtttttttatcttgcatctcagcccagcactcaggaagcagtccaaagtttcagtccagccgggtctacacattgagaccttgtctctaaaagccaaaccaaccaaccaaccaatcaaccaaacaaccaaccaaacaaacaaacccaccaaaaatatagcagcaacaaaaccaggagaaatttagaccaagagaatggaaaatcatccaagcattctaatatgaggtcaggaggggggactgttgaagagttaggcagtgtggggacttgagcactgaaacagctctatgagtcaaactggtccacaagccacacaaaattctgtacctgtcagccttcattgctttggtagatccctgcaagggatatttctattccccgccctaccaccaagcaaaacactaagtgatctgccctcccccagacagagagagcacattggggtgttctgaaccatgaattaaaatacaagctgtgcagcatatgtaagatctacttgatggattctggaagtcgtgtctgtctgtctgtctgtcattcagtgcaggaaatagactgagagatgagaaatcctgatgtcagagcatgagagctaagaaaggaaaaccatatttttttccttcaaacaaaagaaaacaaaacaaaacaaccttacaagggcagagcagatagccaagtgccagttctgcagttctgcagggtgaaaggaccaacccctcctgccacacaggggccacttttagcctggctgggcgtggaagctgggaaaacttggacttcttccctcaggtatgatgcaaaggagcaggcttgtgcttgccctccttccctttgcagcagtagagtgcactcttctcactctctccctacctccctcccttctcatctgtagtcccccatccttccttagcccctcccctttgttagcccttttttttcccttttcctctcccctccctgtgaatgcttgtctcccttgccttctgttttgtattttgcagatcctttaatttttacaaaaagcaaccctgtaagggtgtgccctttgaagggacattttagaaacaacaggagtactgatgtgtgaaaacccttgggataatttgtgcaggaaccttgcaaagcccaatgtgttcaaattcccaaatgatgtggccttataggactcagagacatggcatatataaatcttgactgtgcatattatatacagccatctatgactgtgactgtgtgagtcacagacctgatgtctgttctcagtggctccctctttgctgccctgtccacttcctgttctgttcacctggcatcactcgaatagcaagggctaaaatttccgtggcggcttttcgagctatcatttttaaaatattgaaacaggtgtagtgctggcctcaaacacatgatgttcctggctcaggttctccagtgctagggtgacagtcatataccccatggctgagtttactaaccagtcttcatcttgtctttctttctgtccatttcacgtcatccttattttcgccaccagcattagatctgctttgggacactctgatccctgtccctatgggtctttcctgtcctgcccccttctgagttgctctgaaagccaccacaggctctctgccttgatcttccatctgggctttgttcttgtccagcaaagtggagatactgtgtgtctcctgctaggtctgatacatcctcttggaaagggaaagtgccttgcagatgccagagcaatgacccttgactgataacaaacccgggtcccagctttggaaaacagagccatacaaaccagttggcagaagaccttgaacttgattgttgtgtacctggaaagttcttaaccacaagaaatctgtggcgttatttctttttccaacccaaagtttgtttttcagcacgggaatacaacatgtttaccattaaaaaaaaatgtaggaatgtagacaggaaaaataaaaataaccatacagttgtgccactgtaagccaacagtggttaagacttaatcttctcatacaaaaccaatcagcaacaaatagatgtgaatgaaagagcatgtagtagggtggcatttacttgttgtcactaaaactttaatataccatgaaatacatcaagatgctatgttctcacactgaggtggtcaaacagattcttggatgcttgtttggttttgtggcaaccctcttcatatcttaaatatgttttgcttcaaagtcttgaagttttattaaatataattaattcagctctttgcagggtagagatctcaatgtatttttaaagattattttccaatcttccattgttcttttgtttgaggcatctgcttagaaactttgtactttcttttttgttgttgctgctgttgtttgtttttgttttgagtttttgttttttgtttttgtttttttttgagatagggtgtctctgtggctttggagctgtcatggaactagctcttgtaggccaggctggtctcgaactcacagagatccgcctgcctctgcctcccaagtgctgggattaaaggcatgtgccactttgatacagggtttctttgcataaccttgagccttggctgtcctggaacttgttctatagaccaggctggcctcaaactcacaaacatctgcctgcttctgtctcctgagtgctggaattaaagacaggttccttcccctgacccctggcagggtcaattttgctttatacttaacagtctccatcttcccacaagtaggttcattctgctttcagaagttgatcattctccatctggactttcatgtgtgtgatttgcttcttgtcttcaatactgtgattctatcaatctctctcttctggactgaatgagttttaaaagttgcctttacatggaagattgtaattttcagtgatactgcacagggtgacagtgtctcttgtttcataagaccttgccagtcccctctaataagccaaaagtacttctctagccctggtcgtgtgacattagcagagacattgtctcagtgctggctacagttttattttatttaaaagactttcatacctatacagttttcaaattgtgaacccaagaaaaaattttttaaatgaaaatcacctgttgatctagaagattgaagttaacttctattaaaattttgtggcataatcatttaaactttcactaaacatgctagaaattctttataaagtgggattttattatatataaagttttgcttattttgtttttcatttagcattactttatgaatatgtttcagtattaatgctttttatatcaccattttaaaattattttatactattccaaaatacattccattgtatcttgcaattcaaatgtaaataccacactgtgtgggaatatactttattagtccttgtgataataattcttcaacaaatctgcatttgccagagatttctttcagctatttccttgaagttgggaccctgagctgagggaattcttaaagttcttaaagcttgaactatgcaaagagccctttgcaaagattcccttcttcttcttcttcttcttcttcttcttcttcttcttcttcttcttcttcttcttcttcttcttcttcttctttttaatagaacagtaaacagctttattacatgagctgtgaatgatggtttatttgcctttctgggctttggtcttcctcaggtagaactccagctccttgccttctagcacatagccatctgctctgacacactggcctggtcttgaggcaatacaggcaagaagcttgccctactggaactgctcctccagaaggctgctgattttggcggtctttttcctctcattatatttcttttgaattttctttgatcgttttttgtttaatatttcttcctcctcgggagtcatcttggcccccttcttgcagtacatagtgggactcgcaccactgccggtacggtatgctgtcgatgagcacaatgcagttcttcaccacggtcttggtgaggaccagcttgttattggatgcattgtagacaacgtcaatgacccttgttttgtgagtacagcactcagagccccaggaaaagtttcccacgtccaattttagggcacggtacttcttattacctcctcgaactccggctgtgtgtatacaagggccaatcttagtgctggcagcaggccatcccagctcatacttcttcttgtggtagggctttctcttaccccccccccccggtcttgcggcgcttgtgcctattgtcccgagagatgctcattgctcggtgctggctgccaaaggttcccttctttagtttcctgctgtaaaggtgagtagagtgtcgcctctcagattcttgctagtcccggtgtcatcacccattacaatgcccgccatgaaatagactcaagaaaattggaatttcttcaattcctagttaggctgaattttcaaaaaacactgttgttgacaatttcctgttttttttttttttttgttgttgttgatttcttggtcatactataaagatagagttttgtttgtcattacttcattgaatccactgaaagtatctccccaatatcattacagcaaaggcctttcttgggcaggatttttgaggacagagaaagggatagttgaaaacattcatcttttctagggtgcattgatggtgaaattcctctgaggatgttgactgatcatcaggaaactcaggaagcctcctttggctgcagctctcactatctctcctctatttgagcattttggaaagattcaggttccatttgggccaaattatgatctgaataatgcttccagtataattcaatgagagacatcttttcttctctttccccaaaattttccagtgggatgaggcaagaaggattgtaagggaggtgacccaagtgtgttcattaaaatgattcatgtcaagtaccacaacaggcagaacatgaaactccagtagcttaacatagggaagatttatggaaatttagaggactggttggtccttctgcaagcatgtcatgagtcagaactgttcacatgccccgcccttcaagtctgcctgggaaattgatgagcatatgggtgtttaataagcatccaatctctgccactagagggcagaatttcctcatttaatcatttcatgctcctctattgtctcaacatgtgggctgcatgattcatctactgtttgtattaacactgcattaatactattaggctcacaaatatcttttgctcagagaattttgttttcttcatgatcatcattatcagaatatcaatagtaccaccaatggatttcttactaaaggccaggcttggtgctaagaactctacatacatgagttcctgtaattgtcaagtacttgagatagatattactgttgcaatttttgtcatagatattaaatactatggttcaaatagatgaaagccactctggagttggtattcttagcctctctctctctctctctctctctctctctctctctctctctttattagtttttctgggatgctaatcacagatagaagggacttcaaataacagaagtttgtcctctcatacatcatgagaccagaagtcccaaatcatgccatcctttttttttttttacatttttaatttgaattagaaacaagattgttttacatgacaatcccagttccctctccctcccatcctcccctccccccaaaactaaaaccctacctgtcacatatcctttctgctccccctggatggtgaggccttccatagggtatcatcagagtctattgcatcctttgggatagggcctaagcccaccccagtgtgtcttggctcagggagtattcctctatgtggaatgggctcccaaagtccacacctatgctagggataagtactaaactactacaggaggtcctgtagatttcccaggtttcctcactgaaacccatgttcctggggtctagatcagtcacatgctggtttcccagctatcagtctgggaagcaagagttccccgatgttcaggtcagctgtttctgtgggtttcattagtctggtctggacccctttgctcttcacttgtctttctctgcatctggattccaaagacaaagtgggaaatacccttgaattaattgtttggtacaggagaccgcttcctgaacattacaccagtagcacagacactgagctcaacaattgataaatgggacctcctgaaactgagaagcttctgtaaggcaaaagacacagtcagcaagacaaaacggcagcccacagactgggaaaagatattcaccaaccccatatccaacagagggctgatcaaaaatttacaaagaactcaagaagctagtctccaaaacatcaaacaatccaattaaaaagtggggtacagaactaaatagacaattctcaatagaggaatctaaaatggctgaaagacacataagaaagtgttcaacatctttagccatcagggaaatgcaaatcaaaacaactctgagataccatcttactcctgtcagaatggccaaaatcaaaaataccaatgacagttcatgctggagacgatgtggagaaaggggaacacttctctactgctggtgggagtgccaacttgtgcagccactttggaaatcagtatggtgactcctcaagaaaatgggaatcagtttaccacacaatccagcaattccactcttaggaatatacccaaaagatgcacattcatacaacaagggcatctgttcaaccatgttcatagcagactatttgtaataatgctgtcctttgagggagagtccatggagtgagggagattccatgaagtgctgttcttagctcacagtggttgccatcaattcttggcttcctcacctgtggacaacttctcattacctttctctttgggttttgagcatcactttttgttgttgttgtttgtttgttttgctttgtttctcctcttgaatgccagcaattagagttagggctcatgttaaacaggtatgatcttattcaagctttacttcgattatgatagctttttgtattgttcattcagagttccgtgtctccatgaaattctgtgaatataacctttgaatgtattaacaccttcctatttccttgtctgtggacatttaggctggatatgagccacagctagcacagaaacccttgcaagatgtctcaccaagccattctttttctctggactgactgaggtacctgtctcaatgaattgagcatccatttggagttatgttcccagtgaccccgtgcttgtacctcctacatagggtacagtttatataatgtttattcattaggtccagagctgtgaatggaacccgtggtaggctaggtgtttgctttagaatatttaagagtttttcaaagtaggaaacacattttatattcaatccttggctctagggatcttccttctccagtgtcctattgatacagcagaacaacttaattatactagtctatcttaatgtgctacttacttacttataaattcagtgaaaatgtattgttttttcagtctctggaattttgtagtaaactttgtagtggggtggtttgagctggaagtgatctgtggttttgttcacttgattgtattgcactgacttgaatagagttctgtgtcctttcttacagctaggtgtgatgttacccatacttttaaagcgtttatcatcaggaatatattcatccttttatgtcttcatttgaactccttctgagaaactaagtctttacttcagtctttggcattttgctttgaagactttagtttgaacagataaaatgaattgtgaccatggccttttaaaattaatgtgaccgtgtctctgtatgtgtttatcaatattcactacttccatagtaccttaaatgttgtgacatgcccaacattttaatagcatacatttcaaagggaagagaaggaaaatatagttcctttttctgcagttcatatcctttctgaagcattgctcaaggcaagatgatgtcctgtttgtattgaactagtgaatgaatagaggggaaagagccagtgttccatgatggggacctggattcagagtcctgcttcttgatgtgtgactgtgaacttggccaggccactcagaggcttagtttacctattttgaaaggaggataatcattgtttctgactaaagagggatctgaagtcctttgcctaggacatgggggataacagtcaatgtcgagagaattgttctgtgtgttttcttcaattgtatagtggttgaattgggctcacctcactgtaagcagatcaaatgtcaatattttggatgagaagccatgagcctgctgtgatcatctccatttttttcttccaaatccgatgaatgaaatgctaaaacagcagcaaaatccacctaatagggaaatggttgatttcagtgtctttcatgttttaagaagacggagactgaaggacagatggaaggataagagggaagggaagagaggtaggagaagaggggagatgaagggagagaccagggtagggttttcttaaatatagaatcttgcaagcaaattgagaacatgggaagaggcgggaggaagctaagagggtgagaagggaagaaaaggaaggatgcagaggtcatgaggaagcagaaattttgagtccagtgtagattagaagaaaggacatatgatagataggattttagttggggtggtggtaaaggaggaagggagggagaagggaactgggatagtcatgtaattcaatcttgtttgtaattcaaatatattaaaaatgaaaaactaaaaaaaaggaatatttcttttaatatttggcttctaaagggtgagcttaggatgtcttcagtgtccacacttttacgcagtggttaatagacatcttggagggcagagctattcttatagactgatgatttgttcagaaacttactgtatttagtaatttttgaaattacttgggagtctgaggcaggaggatctcaagttattattattattattattattgttatttttaataaaaaggtaaaagctacactggaaaagtttagtatcaatttagagcagctagtatgacaatctccacataactataatcagctttgatataaatggaaatattctgccattctgtttcattattccactctcatttttgtttgtttactagaaaagaggggagctgtgcaaggtagcagctagattctagcactgcattcttgcaattagaatacaaataatttcttaaaagtgtttaataacgagtcttattggggataaagttttgaagtgtatgtgtttgtttaatttgtgtgcatgcatgtgtgtttgtgtatagtttagggccatgcacatgctaagtaagtgctctaccattgagctatattgacagtccaataaaatcttttccttatctgttttgtttaaaacagaataaaaaactgaatacagactgtatttttgactgtgtatattgtttaatatccttaatatgtgacaattctgttattttacacacacacacactcagagagagagagagagagagagagagagagaaagagagagagagagagagagagagaaatttgtgtaagtgtgtgaaagagctggccacatcggcttgctctcccatgaagcaacagttggcttatgctggttggagactttcagctcctgtagactcttccattctttataacccacacaaggccctattgtaccaaccagaacaacttcttcatgctgccagcctagtgcataaagccttgatgagcttcaagccatcatcccaacactacctctactatcaggtgatgagaatgaaggactttaaatggatcttaaagtccaaaaacatgccaaatctttagattaatgtttacttttgtgtaccattttcactcaggtagtgacataagctaaatgtttaaatttttttccagcataggattgaatcctcaagagtttaaaaactcctaaattaacctgagactccgtgactcaacatttctctttacgtgagcattttggctcatctgctttcctgccttgcatccagcagacatctgtattagtaactttccttatccctttgacaaaatgccccaagggaagaagaacacaggaatgatttagtttgctcacagtttgacagagcacagtccagcatggcagggaattcaccattgagtggacagcagtggatggctgcggcctcatttcacggcagaataggaggaaagggcttcaagcccggtgcctacagccctatatctgtgatctaggccccatatccacagagatccacactctcccagagcagtactatctgttatgggctaagttttcaaacatccaaaccacaacagcttcttttacccacttgaaggtttgattttgaagggcttctaggcaagctgtcataggattctagtcttctatgccatcattttacttctccatgtcacctatgaagatgggggcaaacagtctaccagcattgtgaaataaagtaacagatgtgtaattagcttgtaaattatatggacctatattttaagaaggcattacaatgcgtaaggacatgctgaattgtacatagcacactctcttaacatcccccttgactttgctgttcctagctctgtaatgcccttcaaattaattgctaatcatctgtgtatgaaaagtctttgtgtctgtttttctttgcaatatcatttgtcattccatattaagggcatttgttcacatctctgtcttctatgagattctgagagaagcctccatttattccaggcttggcatactgttaaccctcagtgtctactgaattgaattgggtgaatctgaataattattatctttgtgtctgtcttaaaggacaaagtctatgtctatccatttatttgaactatcctctggtagctgaccaccttcagacctttttaacagcatttatgaagataatggcgatacaatattccatgaaaatggagttctgtattttttacagcaaatgatcagaattcttgggcgtattatttgcaattttatctaatcagcagtgaaagaatctggatgtaggatgcttggaatttgagacacttttatgtgcttcactggtgcagtaggcagtgggtcagtttcacaaaatacttttatgtgctgagaaagacagaagcctttgagagaagacatcacctgtggtcccactccctaggctcttttgatgaacttggagctctcttctcttttatagctggtttgccattcatcctgtcagcatgaacaatagcaaccacctggtaaatagtgacaatatgggctatgcagcttacctatttgagcaagagaagaacagaggttatctacctggacaggtgagaattgatatcactgaaatcttcatcttgattcaaatttcaagtataaagttttctcatgggcctcatgaatatacttggatagaaagaatttgctggtctggaaatggctcagttgtaaagggtatttgctactcctctagaggacagggcttggttcccaacacccatataaggagactcacaacttacgattccagtttcaggagatttgacccctcttcttctaacctctatgggaaatgctcatgtgcccacatgtttacacacacacacacacacacacacacacacacccaagaaatctctatctgtttgtttatcttctcccagtgtagaaagaaatgtttcaaataataaagataccatttgttcttagtagcagatgtttcttatattaacgacttcataaatttacaaccaatttttataagaaagatcagttcctgcaatagtctttgtccaggctggtaatatgattcactgcactgatcttaactttaactcttagtgctataagagtgctgtgcaccttcttagaggtgtaaaaccatgaatggagacagatgaccagaactttttattgattcaggttttcctaaagaaaacattccttctaaggaccttatttttccagtaacacttaagctggagagatgtctcagcaattaagaacactggctgcttttctagaggattcaggctcaattctcagaacccacatggcagctcacagctgctctacctccattcccactgtctctggctccaacatcatatttttggctccacaggcacagcatgcacatggtgaatgaacatacatgcaggcaaaatacccatacacattaagaaagtctaagccccagaaaccttaatccatcactcaagtgaccctgaagctcatctggtactaagatctgaaatcaggaagttaattgacttactacaggaacctcttaaactatgggtaactagtgactacagagggaaaggggtgagagacactgctctgcttggccactggatgcaaacaccagatgcagaagaataaagatgataagagtcaaaggccatagtgaatgacctcattaaaaaaaatgatcttttagctcctttacagacaaaactctatttttctctcttttttagattacattgatttttctttcttatttttccttctctcttccttacccccatcccttccctccctttcttcctcccccccccctttttttgagaaggccttgctaaattctaggataaccttgaatttatgatcttccattttagcctcccaattttctggattcccagtgtgtactaccatgcaatttggggaaagaggttctcctttatacttaatagggttattgatccatgtctttctctaagaaaactggagacgtttattgaaaatggtggatgagactgatgcctggtctgtctctaatctggctgaagaaaagaggagctcacagaggcagcctaggtgatgacttcaagaagctcacaggggcagcctaggtggtgactgtgaaggagctcacagaggcagccttggtgatgacttaaaggaactcacaggggcagcctaggtagtgactgttaaggagctcacaggggaccagcctgggtggtgactgtcaagtgcaagtagacttctgggcttcaggtaaagcaccagatactagatggatggctctacattttgtcacttaatgtactctgcatttcttgtcaaattgtgtgcattagagggaggaatgcctttgaaagacttctttggagactttcattgataactggattattttcagtaatatgatcaaaacatgtgcctttttggaaaataaaaacaatcagaaaataaaataaaaaataagtacaataaaataaattttgtttagaaaacaaaataaaaattctcagaatattgtctatatttttattgtctgtacatgattttgtttgagggctgggaagataattcagttagtaaaatacttcctgtgtctgaattgaatgccccaaattcaaaccaaagtttaggcatgcttgtaatctcagcattggagaggcaattacagggagatccctggagctcaccggccagctagcattgcctaatcagtgaatgaccaggttgtaaaaagattgtacttcaaaaacaactgaatgaggaggtgcttctaaggaatgatgtctgagttggacctctgctcttaaccacacgtgtgtccacatagaagttttatgagtgaattgagtgtgtgtgtctttaatggaaaaaaaataataaaagaaaaaaatataaaaggtaatggtgcatttattttggcagggaccattcgtagcaggctttgcttcatcaaatcttggagatgtgtcccccaacattcttggtccacattgtgccaacacaggagagtcttgtgacaacgaaaaaagcacctgtcccgtcggcggggtaggtagtaagggcacgttcacttcatgtttgaatatttatcaataacatacagatgtgttgtgtccaagtccacacaggctgttggtctctagtttccactcttctctgaagcatttacccagcttctctaaattttaagtgggttgtctaagttttccatggtgatgtcaaatgcagagggcaatgtgtacttccctggacctggctaggcagcttaaaatattttaccttgtaatatttgagttttcaagtttgtgcctaaaactgcctgctatgacatttcttataaattgtaaacctgtagtttttttttaaaatagattttcttttccccctttaaaattaagttaatctttctataaaacatcaaatagcatggatatagatagtaaatattgagagtctttaagtgtactggtttaatgtgaatgtccccacagatccacatgtttgaatgtttacttcccaattgttggaactgcggtgggaaggattaggggtgtggccttggaggtgtgtccctggggtgagctttgagatctcaaaagactcaggctatttcctgattctccctctgctcctgcttgtggattaggatgtgagctcttagctgctgtgcactcactccaccatcataactcttccataaactgtgaacccaaccaaactcttctctaacttgccttggccatggtgttttacctcagcaataggaaagtgactaagacaccaagtactacttgcttccttcctcctcagtgattgttactcacactctttttcctttgtttgtacacgcatccataaacatgttttatgtatgggttctagggcttaagtttcccaatacaatttcctttagaaattgttctgtatctacatctatgtggcgaatttaactcctttcccagaattcatttcagtctgtttcagctttcactcatcagcagatgctggctggcttcccagttcctattctttgtgaattaatcccctcatgttgccacttttgttaccctatgtttctgccctactcaatgaacaacctgggctaacagttacactgtatgtatgttattgtttctagttacaaattttcctttttcttcatttgtacattttgtctcaccattaatttgtcatatattttaagattacttattaaactccacaattcaaagatgaaatggttagataaattatgttcacccgcaatagcatattctgcagcaaattatcaaatgttggaatactggataatgtggcaaaatcttatacagtgtggagtaacaaatttggattcaatattgcatattcattatagtagcaatttttcaaaatgaatgttatatagtaaaagaaaaggtgacatatctttaattgttagtgatttttcttttgatgctgttacagctagctttcattttcctcctgatgtatttttatgtttttctacagtgagcatactttacttttataattggaaaaatcacaagaagactctccttcctccttaattctgttactcttcaattatgtttttggcttccctcattcaagcaaccctgtagacagcatttgctctctgcatcacacatgctggcacaacggtctaagtggggattatgtttccatactctcatgtgatgtgtttctttatttccgacaaacatgttctaagccataactaaaataactttattatgctcacttttaaatgccattattttgttaacccattctttacttttgtgtttttcttcccccccccccactctctttttttccttcctgtaagcttgatcactgactttacacacatctgcacaggtataggagtcctgactgaggacataattgaaagttttctattaaagagagaaaacacctaatgcatgctactcatggcctgtctaccctttcagtgacttgtccacccacccatgtataagcgactattgtcccaatcttcatttaagccaagtatatcactcttggatttcttgatggtacaatatgcaaagagctagctctaggttaaatttccatttcattattcatgaggttgaacatgttctaatattgaatgaccatatgcacacacatgagagagagagagacagagacagagacagagacagagattaattacctctttggtttgtaattcatggtacatgcgttatgatgctttttattgcaagtaagagaaatgccaactcagcatgcataaatcaaggggtattaataaagacatccttttcctttattttttgaatttagatgcagtacttggacaaatttatattacagtagtttgttaatctgcttaaggatgttaggataataggcatacccacctcttcaaacattaattgattttacatgttgggaattttgcatctttcttgttattttaaatatagcatgcattgttgtcaacagttgtttccctactgtgccacagaaacccagaataaattctgtctggcattgctttgatgcccttacctaacttctctgtgtccccttcctctccacctttcctggtctctattgactactattccaccccattcttgcatgagatcaactttttagcttttacaagagagtgagagagtatgtggtgtttgcttctgcgtgtctgggttatttcactgaacagaaggctcccagttctgtgtacatttctgcaaataaagggattccactccctttcatagccaagaagcattctattgtatatgcccgacagttgtctgttgatgggcactgtggttgaagttactgtgatggatagtatcagagcaagcaaagacgtgtaaaaaatgagtataatgacttcatcccctttatataggtaaaagcaggatgttcttccctatggaaaaatcttaaagttcctaatgcattcgttcttaaaatatttgtcaaaagtagtacaaaagttccctactgtataaattctctatcagccttatttatgttgtccctcctatatagatgtttaaggtgtcaactttactaagcctgtttttaaaattatttttaagtctttttttttatgtttcagactgtaacatttatttacctgtattttctttccttatgttctttgtgacattcatcttatttaagtatttggtcaatctggagttttgccgatttaggaaatgggatatagagttggaattgttcattttcttcccaggaggatggctaattgttctgatataatctaaatgagtttctgtgtgggacagtcagagcaagatcccaggcaagcatgagcaagtaaaaaggcagccacagagggtaaggcctgccttccagttccagctcagagttagctccttgtacaaagtacatctaatctctcaaccaagctgaagctctgcttcctaattttaaaaggaagtgactggaatagatgcaatctgaaaaattccctcctctaaatgcatgcatgattatgtttgctctagcctgtaaattgagaaaatgtctcaagagaaaagctagaattggcttagtaaacgttggattcagttgcaattttccggttcttaaagccatcactcattgcactaaggatcttattgtcttattttgctccagcctagcatgtgcatggccagcggacctggacaagatatctttgacagcacacaaattataggacggatgatctaccagacagccaaggtaggcacgagcccagtggtttccatctttgtttcattttgttctttaaaacccacagacatcatttattaggaagtccataattgcaagctaggccacaaaagctcaggctggccaggaagtctaaaagatttgggtttgtgaggttacccttgggagccacacaggactctgtctgatcttgtcagacttcctagtgcatttaaaaccaagcaagcaggaaaacattctattttaagatgttagaaagcctgagtgttcacctccgactgaggagacagatagattgtcaagtgttcagttaatgtggcctcacacaggaccagcctgatgtagattctcagaaattcttccagtcattgccgggctaaaagcacctgactgcttctgaacttggccttcaatgacaaagatattctggcaccacaaattcccaattatttgtatgcttctttgaaagggcaaaggtcacatcgcctttctcccatatgctgaagggagaatctggttagctagggattactatgaatgactccatcttcttcctggtcctaaaatttttgtttcatgtgtgtgatgcatgtatgtataggcgtgtgcttttgggtgtgaggatgcatgtacacgtgtgcatgcaacacatgtatgtggaggaccaatgttgaggttgggtgtcttgcttaattgctctccaccttgttatttgagaggagtctctcattggacttgaaacttactacttggctagagtgactgtccaacagtcccagagtttcttctgtctctgtctccacagtactggggttctagaagtgtgtctctctactctactggggttctagaagtgtgtctctctaccatactagagttcaagaaatgtgtctttctactctactgaggttctagaagtgtgtctctctactctactggggttttagaagtgtgcctgtctatctactggggttctagaagtgtgcctctctaccctgctttatataggtactgggaacagaactgaggtcctcatgtttgtgtggacagagccatctccccagtggtgtgctaaattttgtcttttatgctgtccccatttttgtacctgcttctacagagtcatttctgaggggaaatgacaaagagaaatggcttctaactgatatgtccatgatagtattaagtacctctgttttcatgcttgtgtgtatgtgtgttcatgtacaagtatgagcatacacatgtgggtgaacacacacacacacacacacacacacacacacacagttatacctgcctacttgtgtttacatagataattccttctgagttccaaaatgtttcagaagcaattaagaagaacaaatgttcctgccaaaagcatccgacataaaatctataaccacagacaactaattgctatagtttctttttatttgctgtggtattatcagtggattattttaagttaaaggattccttttatgtgggtctgtaacacacttggtgccagaaattttgtttctgtccttggcctgagagcagagagattctggattctcagtaaggtacaaggtatgggactccagtttcttatcttaaaaggccacacaaaactgtcatggaagtggcctaggtgtcaggctagtggacttgtgctaaagtagggaatttcctatattgtatgacacaaattaataagcacaaatgtctctaaaagtattaggctaatatttcctatacgcttggaaaaacatcacttgattttatagaaacaaaacaaaacaacaaccacaaaatgcccacccagaatgtcaaagagtagctgatgtgtgggggacacagcatctttgaaccacctggctcctgtccttggagagctcaggtgtcctaagaggggcactttgtgccaagtctacctgctgacagcctgacatcccagcaagtatgaggttggagcttttatgtcatggtctgtttcattactaagttcttatttgggatgaagagacacaggttgacattcccagaggtttctggttctgggaagctctgggattgatgatagaattgtggggtggggttgggggtgaagatgttttcaagcagtgagtgaaagaaagctgtcttggtgcagaaggtgctaggtgcctgtgttaggtgtccatttctctctggttcttttcctcaagacagtgagcctatgtgtgctttctaggagctgcatgactctgcctcccaggaggtgactggaccagtgctggcagctcaccagtgggtgaacatgacagatgtgagcgtcatgctcaatgacacatatgcagtgagtatgacacaggacactgaccttgctgcatgggcagagcgcggctgactgttacttactgctgaacttctgtttctttgttgttgttttatggtcctttctgcaggtgaagacatgtaaacctgccctgggctacagttttgcagcaggcacaattgatggagtttcaggcctcaatattacacagggtgagatggaggaggatggaatgcgagcttccaggttcggaggcttcaggcttctgtttcctaatgaagcttaactgtggtcagtgtgtttatgattaccattttaactcaggaggcttcaggctggccaagtctgggtgtgacatctcagattccccagggataggcatcttttgtcccttagctttgttaattcaaataaaggcagagcaaattctcctggcatttcagaatattgatgaaccttggtaatgcagagtgtgtgtgtgtgtgtgtgtgtgtgtgtgtgtgtgtgtgtgtgtgtgcatgcatgcgcgtgtgtgcacacacacacacattagtttgtgtatctgcgcagtgtgcctgcacagtgcctgtatagagatgagaggtgctgaagcttgatgcctttcacttattgttagaggcaggttctctcttggcttggaaattgccatgtgtccaggctggctaaccctccagcttctagggacccacctgtgtccaccttccagttcatcattgccaagactgcaggtgtggaccagtgcacctgactttttatgtgggctctggggatctgagttcagatcttcacactttgggagcaagctcttactcactgagccatctctctaacccccagaatatccattgctttaagcagtcatgattcctttgtgctagaagtgtgctaagagtataatgaagaaagtgaaaaaaagaacaaccttgagaatgagagaaaatgttttcaaatagtatatctgataagggaattgtatatcaaatatattttagaaaacctcttataactcaatagcagttatctattgagaaataattgacaagccacataatttagccattggatggtttttaatatgttggcaaacacacaaccctcctaaactctactttggaatttccatcactccaacagaaaatctgaatatgctagctgcctgctactgtataagaaaccaatgtgcctcccatgtctccattttgctaccttgctatttcctatgaatgggaagacatggtatctggatttttgttgcatcttttatgtagcattgtgtttttaaggtacatggaggcatagatgtggaagcagtccattcccttttatggttgaatgaattcatagtatcaatataccagatgttatttgtcaattgttttgctgatggaattttgccaatttcttagctgatggacctcgaggttgttctacttttttgtgtattatgaataatgatgcctttagtacatgtgtactagcatttgtgagggtctgtgtttgtgactttcttcttgggagtgtatctagaagagagcttgctggtcaaatgcgacccgtgtcttaacatctgaaaacctatcagacaagttccaaaatggttgcattgtcttacgtctgtgtcagcaatgtatcggttcaggttctccacatcctggctaatacttgttatctggctgattctagccagcatgtatgtggagtgctgtcttctatggttttgatttgtatctgcttgggtaaattatttgaaaaaacaattcccccatttgataggttgtctttgcgatttcttgatcatactctttgagacacaaatgtccagcttagtctcctttttgtgactagtggcttgccatcgtatccaccaaccattcaccatcttgaaggcttactctataattctttgttttaactttagaatttataagatttatttattttttgcagatgtttcttatttgaattagaaacaagattgttttatatgtcaatcccagttccctcccctcctcccctactacccctccctcctcaactcaaaccctatctatcacatatcctttctgctccccagggagggtgaggccttccatagggggtcatcagagtctatcatatcttttgggatagggcctaggcccacccccatgtgtcttggctcagagagtatccctctatgtagaacgggctcccacagtccccacctatgctagggataagtactacaggaggccccattgatttccgaggtctcctcactgaaacccatgttcctggggtctgaatcagtcccatgctggtatcccagctatcagtctggggaccaagggctctcccatgttcaggtcagttgtttctgtgggtttcaccaacctggtctggacccatttgctcatcacttgtccccctctgcaactggattccagttcagttcagtgattagttgtgggtgtctgcttctacttctggatgaaggctataggatgccatataagtcagtcatcaatctcattatcagcgaagggcatttaagggagcctctcctctgttgattagattgttagttggtgtcatctttttagatctccagacatttccctagtgcctgatttctctgtaaacctaaaatgtctccctctattatggtatctccttttttgctttcttctattcttcccctgactcaacctttctgctccctcatgtcctcctcacccctcctcttctccccttctaattcccctagctccctccccactcctcccatgctccccatttgctcaggagatcttgtccctttccccttctccaggggaccatgtatctctctcttagggtcctccttgtttactagcttctctggcagagtttaccctataattctaaaagttttactattttatctcacatgtcatacaactgttaattcttaaaatgagaaaaaggtgatgcagttcacaaatctgtggattatataaaattgtctttattcatgacataaatgagtaaggttaatataaacaaaacattgagaatatcacacaaaatgtattctactattcttttatataaatgacaaaataattaagggttattatgttgtaacatgcagaaaacacttcctcttttatcacccaaattgttgaagccattgaaggatgaccttaacaaaatatctaacatgtctaaaataattgtgtgcaatactatctaaatcatgacatccttagagggccagtaccagggatcttattaatcataacaattctaataggaacaacagaaggggatccattttgggacactattcgggaccagctcttgggcaaaccatctggagaaatcatagaatgccataaacctaagccaatcctacttcacactggagaggtaaggcatttgcttgtcataatgtagtcagaatattatactttgttgtttctgagctgtaataaatggtcagtataataatggtcagataataaatggtcaatgtctactgacatggaagctcttatttagatattcttacataatttattattattgcatgtttattattattgcatgtgtgtacaatttgtgtatgggaatgcttgcagagagcagaggatacttttgtgcagttggttctctttttgctcattttcatgggtcctgaggatcaaactcacaacttgtgtgtctagcactttacctacagtcttctcagtcagtcacaccccatataaatgtttaatattaaaattttatttatatatgtatttgtttttctttgtatgtataggtatgaatgcacatgtgtgtatgtatgtatgtggagacagtagtaacatcagacgttactattcatctgaactacacaccttgtattttgagacatggtctctcactggggttcacaaattcggctagactggctggccagcatgtcccatggatcctcctatctctacctcccagttctaagattataagcacatgccacgccgccacgcctgtctttttagagtgctgcaaatccaactcaattacttctgcttatttggtaacatcagttattaaagtaaatttttggttgttcttttcaagacagggtttctctgtgcagccctggctctcgtggaattcactttgtagaccaggctggcctcaaaggcagagatatacctgcctctgcctccccaatgctacgattaaagccatgtactatcaccacccagctaaagaaattttcttttaacactactttagaacatatttttttttacatttgctgtgttaaaaagtcaccccactattcatagaagcaagattgttgaagtttaagtatttaaaaagtagactttcccagtttcctattaaaattcttagggttggtggaagagggaaggaaggggtggagggatactttccactgatcacaatgtgggaaaggatagattctcttgaaggaaccttggaagataatgccagatttgggagttctaaactcaaagcactgctagggaaaaaatagaaatgattgcattaaactattatgcatggtattctatatccattgaggagatagtcacttaccttgcacatacttatgagttcaccaaagctcctgcaaatgctgtgtcaccctgaacttaacaaaggaacttgcatttgagattcacatgctacagccaggacataaacatgcacatgatgtgcttaatgttacatcatagttataaattgatcctatgatgtgctgaaaaaaaacagaactggtttcaaacatttggaattgttcaattaaggaacttaagtgactgttgatgatagaaaggttaatttatacctaatgtaattttactgttttgggtctcagctgacaaagcctcatccttggcacccagatattgttgatgttcagattgttactcttgggtcactggccattgctgctattcctggggagtttacgtaagttctttacaaaaattttcatagtgaaaagatgtagtcctgttgggattaattcttttaaaaatcatttttctgttattgtgttttttgggaagggatgtaggccatggcatacctgttggaggtcaaaggacaggctacatgagtcaattctctgccttcaccatatggcttttagagacagaacttgagtcattaaacttgaccgcaagcacctttatctactgaggcatgttactggactaattctcatgggaaggtagtcctctgcaaatctcttagtagccttctgtactgtgttttgcaacatgataaataattcttcctaatttggtgggtcctctgaagaataaatctgtccatgcttattgcctgtggaaaagatagggaaaatgtgaagaattcacaaatgtggcattctaaaggtaaaggggtgcaatgattgtgtcggcacacagacttgaaataatagtaaaagacttgaaggcatcagtttagatactgaaaagactggagaatgttctaaacccatatcttttataatctttcccatcttcataaggggaagtttgttgaaatagtctttgaattttctgctttgcttccaagaattcattgaattctcacattctacccaacacattctatcattccccaccctcgctatcattccctcagattatttcagtaacgtccaatttgggttcctccattacttctctgtagtcctttctcaatatagtcctttaagacagtggttctcaaccttcctggtgctgtgaccctttaatacagttcttcatgttgtggtcgtccttaaccacaagatgattttctttcatatttcgtatttttctaatgttataggaatcataatataaatttattggagccagaggtttaccaaggaggtcgtgggctagaggttgggaactactgctttaaagcatgaattaattcaatgtgccgcttctctattaaaaacctcccaaactctgcacttcttattccaggtagtccctcagatcctcctgatttctttcaagttcccatgcagtctgtgtctcagcaagccccctggtgtgttatctttagactttccctcttgctggccctgtttcagtcaccctgcgtcattgtcaagttttctgtataggtagaactacaaatgcacttgctagatcactaagcatgttctggactcaggcacattgaattgtgtgaatgtatgaaacgctttctcttcagttagtcatggccaagtcttttaatgtttttcaatcctctgttcaaatctctaataagagatgccaattctattgacactacataaaatcatctttaccatcaaccaagcacggtcactctcacatcagcaccagcatcttctgccaccaccactctcaccaccccttacgcccttagtctgctatatcattctctgtgtttcttcatctcacgttctcatttatttggtggtcatcttccatccttggcctataagttccatttcattaaatcattagcacataaaagtggtcctggtaagcagatgttcaacattatattgaaagattaaatataaaaaaaagaaagggcaagttctttctgccccagctctctcacatgcaggatgcaactaacccattatgttgaacccatgaatagaaaatgatgccgtcattttttttatatggtggagttctgggccttgtacctgccaggagaatattccactgctgagctacaccccaacccttgatggtcttcttctctcagtgttgttcattgattccatttccctctttggtccagttgtattcagtatttgttttgaagagaggccaaccaagggaaaaagctaagccccccccccttttttttattccatagacttcctacatattttactgttgtgggtgagctaggctaagttttttggcatttcctaaaagcctttctgaatagttcccacatattccaaatgggaggatgtttacataattctattttcttgcctcagaaccatgtcgggacgaagatttcgagaggcagttaaaaaagtaagtttgaatatgaatacaatgcctggacatttgtattggaagaggagaaaattctctattgaattattctttcctaaaatgactaaagtttatgtttcttgaaagcagtggataaagataattatgaaatgtcagtaagggtattacgaccaggttaaaatattgataatgcttgtatgacataaaaagtaaattttatctagagactgcttagaaccacatgaactgtctaaatgaaaccatcacattagggaaattttatttttcccctatattctctttaggttctagatgtattgagaatagttgcaaaatgatataactgtcatgttatttggatctaataatatctgctggaattatataatataaattcaatatagttttgaggcaattactttttagtagtaagagtctatacctgctgatgttattattaagattttcatagagtcattgatttgcccaactgcaatggggattggatctaatttccaaagtactctttgacatctttgccttccttggtggttttggccattgggaagatttttcttaagaggtgcatcttctgttaacaatccatagcaatgtgtatcttatgtggagctcagacagcaacagccttcagaggtataattcttccacttttccctcctaggaatttgaatcttatggcatgaaggatatgactgttgttatttcaggtctatgcaatgtttacacacattacatcaccacatatgaagaatatcaggtaaagtaaaaagttctcatggctttctcattgcacattctttctgaacttcttcagccatgtctctgagaggtgacttggttttaactgagaattcaaagagaataagccaaaaattacatttgatttggtgtttattacttccaagtatatcttagcttaatagtctcattgacttccagcttctcctgaaacttgttttgtcagggacactggtaataaacctgggttgtgacatgcaaataattacccataatgcatttgatatgtttagcatctgctgtttattgaatgcaccagctaagtactttgcaagtgtagctgcacacgatcttcatggtacaccctcaaatagcacattatctatgacatgactcaaagcaaaacaaacacccaaagctctcagagttagggagctggtgactacaattacttttaatatatagttctgaaagcagtccagatacttaaaaaaaaaacccgcagtaattagttaaatataacaatagcccagagtcccacaattaatgattatgaatagatcttctggcatatcatagcagtccatacaggagcagagagcaacccatggtaaacatttagtgatacgagaattggaatctgccctgctgccctctgttggctttgctgaggatcttaacttctagaaatcttagttgtattagtcaacttcccatcagcctagctgcctgagacaaagctaacaggctgtgttgctcagttgagttgctggggaccattttcctgaaggcttcagctggggagggtcagggacagctctcccactcttatgacctttggggaatagagtgccccaaactgccataggtggcaggggtgtgctgggggtcatctttttatcaccctcaccaccacaaggcagacaagggagctgaccctccccctttaccagctgcagcattcaggaaagcagccctgcacctgccctgggcagcacagtagagctgaatctgcccactgtggtgaaggtgagctggccctgggaatgtgagcttgggagatctggcctctggtggtgtaggtatgggtgagccagttccgtggacatgaaagaagaactagccctgccccttgctcctgctgcatgggggaactagctggagcaacacttgagagctctccctggtggtgaggatgggggggatctggtggcctaaccaaccgtgtaactacgtaggtcccctgcctttgtcacacagttcttgcacacctggaaataccttttattctttttcttatgtgaaaattacaggtgttactaggtctaccttcatcatattaactgatagtgtaaaaagaagtacacatttttagttactgtcagttgatataaccattcctatctaatttgttttgatcaatctcaactattttgctttatgcacttagaaccatcattctgacaggtgttccacaggtctcaatagacttccaaagaagtccatggcacaagcaaagtttggaacccctgctagcttgtttccttatctagggcaattttctgcattgatgtgtataatggacattttgaaagtctataataaaaagattcttcttcttccctgctgttccatcagagataagggagaaagcagatgaagatgaagactgggggctaaagaaatggctcagtagttagcagttcggttcccagcaccaacatgggtgctcacaagtacctgtagctccagttctaggggatctaatgccttcttctactgattttctcagattcttacatgcatatggtacacacacaatcacacacaaacactgacacacagacacagacagacagacacacacacagagagtaatcaattaactaactatttaaaacaaaagatgaagaccggcagacatttctctgagtttttgacaacacattagggtcagtcaagcaaataaaaaattaggaatgtcttctatatagagcaggaaggtgcacaaaaatccagagagtagacatagcatattcattggctataattaactgagtctgtggagtgtggtggtggtgatggtgaggtgaaggctagagtaggaggcagacaagtggaaggaagagtcctttgtgcagtagagtggattgttgactttgtaaaaaaggttttggagagagttctttgattcatcccatgatatctttagaaacatcattgggaagacagggtgggcctatgtggagacagaattgatcacacagtagagttaaggtctgggtgaggactgaaggtttactcagaggtagggcccagtggaaaggaaaacagaacacctcgagaaaggtttaaggaggtacaatgccacaattggcagacttaaagaatgtaggaagagggggtctaagatgactgccaactgatagccatagagatactggaagggtagcacacagaatgctgcagggaaaagctgctgtttctggagtgattagaaccttgtacactgatgaccttgaggttcctgtagagtcaccataggcaatgaactcctaatgagatgttgagatgcatttggctctatttcatagctttgtgatgacatagaaggccctccacagaggggaccatttgcagccaacttatctaggagttattaaataggatcctttctaccatcattttctttcctgatgttcagcctgggggatatcactaatattgtgagaacttaaaatagacatgagcacgagaggagggagtctgtaacatctttcagagaagaagaaatggcagcctaaatggcataagcaaaaagaacccactgcctttacaaggatcagattcagccatgaactctggctggttagtggaaaatgctcacattctgttttcacaagaaccactgagtatttgctggtattgaaatatgtgagtggtccagacatcacttggccaaaaatgctatacttctataaatggatcgatgcatataaaactgcctgtacctcttctcaattttcctgcaggctcagcgatatgaggcagcatctacaatttatggaccacacactctgtctgcatacatccagcttttcagagaccttgctaaggcaattgctacggtaatcagcgtgtgtgtgtgtgtgtgtgtgtgtgtgtgtgtgtgtgtgtgtgtgtgtgtgtgtgtgtgtgtgtctatattgtcttcaggataaggaggcacaaaatcaagaaagaaaccttagacacacatgttatttaactaattttatattatatgcagttttccttaggaaagaaaaccagaatacttgatatcactaagaaaataatttaaagttttctgacagcaaaactcaagttgaatcattagcatttagtggtggcagactttcatatacatatgcatatatatgtatatatatatatggaactattacttgaaataaggagatattatttttctccatgtttttagatggttaacacttcttgaagattgtaagtggtgatctgcactgtaactatagctggcattcacttttcagattctctcctcccattcagagttgagtagaccatacagttagagaatatttgagatgcacagtttcttcattataacattttcggaaattgagatgcatcttccaatcagaggaatgttacccttacaactagcagcatttctactttgtggtagcaacaatttcttgatggatgaaaatagtataagttgttgtgacgaatagaggcttaagtttgttgaactctaccattgccttgccatgcacatgtgtgtgtgtttctgaaatgtatacaactgatttaaagttccttagcatgggaaagcccctttgggatacactacttttatatagctgcaggtgcggtacagagaattagttgacaagtagaacaaagaccttaaaatcacaaacagatctgtatataatacatgtaagctttataattgtaagtatattatttgccccataatagccttataatagtgaaagctgtgaaattatggcctagtaagtacaattaaaccctttaaagaaagggtgttgtttactggattgaaacagatgagatctacatgctgtagacaaactacagcaatttcatacgcctctgccttaagctgcctatttgaatttttaatataatctggggacttgaacatttttgcttactcaattttttaaaaatcatagtgcccctctgatttttagacctagtcctttgttcatttagtggacacttgtttcttggtttacattatggtcacttgttttaaaactgactgtgatcttgaaaaccaagtgagtatattcaatctgtcttcttgctttcagggcaagagtgataatactcccctctcacatacacaaacaccatttgctgctataaaaactaacaatccaatgtaaaggctaaagaacattaaatatacttcaagggatattgaaaaatgagattattatttttgatgtctccattaatgttggtgaatcttatggaaaacattgtataagtcagaatacaggctaatattaaattttaaataaagatgtatgtattatattatttagcacagatttgataccatgagagaaccttggtagtgactttgggtaaaagattacccacagtttgaaccaagcatgttggttcttgcctgtaaccctggcacttgggttaaccagggtagtagaatcatgagttccggacagcctgggctatgtagcaagttctaggtaagcccaagttccattgataaaaccacttcagaaaattcccaaccaaccaaccaaccaaccaaccaaccaaccaaccaaccaaccaaccaaagtaacatgctagaaacagagaaatatctcatgcttgtaaacatgatgatccaagtttgatcttcagcacctgaatagaaaagctgggcactgtactgtgtgcttgtaatctcagtgctggacagatagagacaggaggatcccccaggcttgcttacaagctatttagctaaatcaatgagaaacacttgtcacaataaccaaggtatgtggtacctgaatggcatttggtgttgacctctgatatacacacacatatacatcagaacatatatgaaaacacattcatgagactcaacactgaaaattttaaatataacttcagtatcatgtcatgaaattacagtgtctgttaggtccctatcccaagccacacggtgaataaatggctgcccagaatataaccataattgtgtgattttgtgtttgctttctaatctctggattataccagccaggcaagcaaagcaactgccttcaacaaaaactttcttctaaaaaatttaaattatgaacatttgggttctcattttagcaaaggtgcctcatgttttgctaaatgttaggttttttggagtgcctgtgcatagatctatgtgaacctcttttaatgagggcatttcttgtgataggaatgggggtgggtaatatcacttaatgtgcattgtgcatttctttaacatatgctctttatttcaggacacagtagccaacatgagcagtggtcctgagcctccattcttcaacaacctgatagctacacttattcctaatattccagatagaacaccaataggcagacattttggggatgtcctgcagccagcaaaacctgaatacagagtggtaagattcacaggaaagtctccaaatgctttaggaatttgcttctggatttgaaaggaaagatgttgcttgccatcatcacctgcttctagtggtaccatatcattgattcagcaattatgatgctgacagtactacaggctagcttcagcaataaggttgagagtaccataggctagcttcagcagtaatgatgatgacaatactgtggtgacaatagagatgttgacatctatttctgtctcttcagaggttctgcaaaagagagggaaatgggaaactctgcttttccccctggcaattaactatatagaattgaatttctaaaatacaaattattctttttattaaatagatggtcacagaattgtgcacaggagttgggccaagttgtcttatagatcaagggatagaaaagtgcacagaaatgaaccaggattcataccacttcatttaatgttgattttgtgttctgcaccttgctgaaaattgtattaattctgaaaggttctttttttattatgaattccatagggatttctacacatattatataaacagtaaatgaaataactttctttacttccagatttctcttttttctaatgaagcatgactaagcttcatagtcatgcttattaattatcaaatgttctagaatgtagtgctagtttcccaatgctgtgctaaaacagctgagaaagcaactgaaggcagttgtatcagttaattttctcactgctgtagcaaggtatctgataagaacatcccaaggatggaagagtatgcttttggcacacaaatggaggattcaatctaccatggtggggaagccatggcagtaggtgtgtgaggtaactggtcacactgcctcccctccataggcacaacagagacgcaaatgctggtgttctatttgctttccctttttattcagtctagtcttctagtctgtgggatagtgccactcatattagggtcttctgttgtcaattaaccctccctagaagcttcataaagatcacagatgtatgtttccttggtgattctaatcttaccaagttggtggtgagagttaaataccatggagaggatttatttggttcatggtttcagaggtttcaaattgtgtcacttggctccattgacctgtttctgcatggtgaggcagaatatcatgaaggaaaggtgtaacaagggaaatcttcccccctcacagtgtctgggaagtacagagaaacacagggattggccagggacaagatatagctttcaaaagcttgctccaagtaacctactttcttgacaaggtcccacctcttaatgactcattcagtataagttaatatgctctactataattaatataattatattatgctaatataactaattagcatagcataattaatatagtagagcatattaatagactaaattaaagaaaaccacatgatcacttcagtaacacagaaaagcactcacaaaaaatcccatatctactgccaagaaagtctctcagtacactaaggatgaaagaaaactgtcttgacctgattaaagttgtctcctgaaatccagacaaatgtcacattaaagggcatacagagagtgtgcagttaagagcaattcttgttcatacagaagactcatacttgatggctcatagctacctataacttgagctccaagatgctgtaacccccttctgtcatctatgggtacccacacgtatgtagcatatatccatatagacacagacacatacacacagataaataaataaacatgggaactctgaatacttgtcttctaagatcagaaacaagccatggctaccaaagtctcacaaatcctagtccagatttgttgtggtttaaacatgatttgtcctccctcccacagtggttactatgttgaaggttgggattccaggaagtagaactgctcagggatgatggaaatgtgatggtactaacattaccaatgggtctatccatctttatctactatgaacttatactgaatatacatgccatcaaagcagaaggggggctatttgggaagaaaatgtggtcagcaatagggggagatggggcacaaagaattgtgggggtgaacagaaacaaacaataatgcataaacacacacacacacacacatatatatatatatatacatacataatgcatacatacataatacacacacacacacatatatatatatatatatattatatatatatatatatatatatatgtatatataatcacagtgtcacaaagaaacctggctcatactttcttttgctactgtcatgtcacaatattatatatgtatttacatgtgaggcaaacacatgcagtatttgtctttctgagtcttgcctctttttttcccctgccaatttaattatccatcataatggcaaaaagttctgttgcactacattttctttacctagtcatgtgttaatgaacatgttggatggtttcccatctcagctcatgtccatcatcctgtaataaacatagatgtgcaaatatttttttctggtatgctttcctggttagtttttatcacagtggtacaaactggagtcacctaggaagagggaacctcaactgaggaatttccctcctcagattggtctatggctgtatctgtggggcattttcttgattaacgattgacgtggagtaagcccactgagggtggtgccactcttgggcaagcattcctggattgtatatgaaatcaggctgagcaagccatggggagcaagcctgactctcccatagtttctgcttcagttcctgactttgggttgctattttgagtttctgctctgaattggctcagtgatgcactatgaagtggaagtagaggcccaattcacactttcgtctccaggtagttcttggtcagtgttttatctcagcaatagagaagcaagctgggatgtatggtgacttggaacccttcatgtatatgtctgcggtgataaatctggatcatctcatagttctagctttagtttctgagcagcctcagtactgatttacatacctaagtgtacatttccacaccaggtgagaagggtttctctgtcccccatcctcaccaacagtggatgttactggtttggttgatggtagccagtccaacaggcacaagataaattttcagtgtagtcttaaactgccttttcctgacagctggtgctgttgtgtacttgaaaatatcactaggacatttgttgttcctttcagacccagcttttctttctctttctctgattttaacctatttatttatttatttatctatttttaggacttaaaaatgtcggttaggagaggctactgtggtatagtccccagtataatttaccattgaggtttatagttctgcaaattttaatgaataaaatttgttattgggctatttcatgcatgtatagaaggcgttctgattactcactccccactgtctcttgtctccttcccattcatgttgatactccctcctccatacaggtcctttccaatgttcttgtctttttgttttgttttatgtcccctctgggtttactctgcattatttgcagagtaaaccatctgcatgaccatgggtatggaattagacaatggaacctgttgggcacaccagtgggtacacatctgaagaaaatgactcctcatcactgagaattcatagccactggtttagaagggatgggtagggccacatgagaaacctcccatttcttgactgacttttgacaggtccagtcttgtgtgaggccagtgcagctgctgtgagcccatgattgcagtggttatgtcaaattcagaaagtagcatttcacagccctcctccctatgtcctggttattacattctttttataccttcttctgcaatattccctgaaccctacatggaatgatataaatgccctttttagggccaagaactcaaccatctttttatactcagcaccttgagtaggcaagaatctgcattcactggtattcattgcatagagaggcttctctgattaaagctaagagaaacatttgtctctgattacatcatctttcggaaagcagtttggcgcagtgtcaatcttagttgtaggcaggaccgctttttggaaaggcgatccaggtctgtacaaaatggagaaatctagagactgaagcaatggctcagcactttagagagtgtgctcctcttcgaggggacatgagtttggttcccatgtcgggtggctcatagccacctgtatctccagttctagagggatctgagacatctggcttcagcaagcaccagcactcacacacacacacacacacacacacacacacacacacacacacacacacacacaccataaatacatgcacacagttaaaaatgaaacaaggaaatatagtaagtgagctcagtgctgccttgacctttgaacggtgagccagaacaagcactttctcccaaatgttgcgtctgtcagggtattttgtcataggaataggaaaagaaactaagacagatacctggcaaagatctggagcaccctggagctgcttcttcactctgctcatggtagctataactgtttgccttctcttgtgatttctctgtggtctgtgtaactgttgtgtcatggtagggctctgtaatataatttgaagtccttttaatgtgctatcatattaaaattatagctctgagtcttcatttatatcagaatctaccaaaataaattccttggccccagttcttaacaaactcatacggaaaccaattaaatagagcagaatgtatgcaggaatgtatatggaatgtatacatctaggatcctagaatgtctagtagataatgtttcaaatccgaatacagcaaagaggcttgtattagatttaattaagtgccatgtgtatttgcagggagaagtggttgaagttacatttgtaggcgctaacccaaagaattcagcagaaaatcaggtgagcatcattgtcttccaaatttaaatctacttttaaagtttcccttcaccttacaggtttttcatactttattttgggaggtgggaaagtgttcagggggttcagttaatgtggaattggatgtggaacacagcacacaggaagactaatggacccttagtgtcatgtggcacttctgcaggccacattgcttctccagaagataaggattcagaggcattctcattcatacgtttaaatttagaacttactaagtttgttagcatattgaaagggccaaaaaaaaaaaaaaaaaaaaaacaaagggaggaatgatttcccctctttttggggaccttctgatcccatccaggattgctactctagacttttctcttctgctttggagtgatcacacgctggtacatgccctaagagttctgtcccatgtgctttgtgttagcttatgtgttgatatattatttatgatttattaaagcttgccttcctattgatacaataggctgttcaacttggaaaaatgacataagacatgtatgcctgctataaaaacaaacagcgtagaaaataataggagtaaacacagaagtgcttttcttcccacaaatctgtttcttagagttaattgctgttgataatttgtcacagcacatgtcctgtgctttgcttttatgatatatatgataaagcccacacacaaatatagcgtgtctagaaatcaaatgactgtagtcttctgtaatttcctttcttgtatccccacaaacaatagcagtacaggtgctaactgtaaacatctaaccaaacgagacacagaggctcacggttgtgaccccagaacttgggaaatggagggtagataaccaacggttggaggcctttccattctatacagcaaggccttgtcttaaaaactaaggaaattggttggtaaagtgactcagtttgtgaagaggcttgtcaccaatcctgaggaacctgtgttctgtcccaggaatccacagaaagaagggaaagaattgactcccacagtctatcctctgacatgaacatgtgtgctgtggcatgcttaacatccttcacagtacatgcccaataacataaagtgagcaaaattttaaaaataccaaacaaaagaaggtaacaaccactaccacaacctcctaacacaatttgaagaaatttttggaggaaagtgggcctataaaggtgatttttcaggtcacttttctatcctgactgtagctgtagccattatattgagtcattcttcctagggtccaaattcacttagaatccaaaacggccttcctcccaattgagctgtgccatttctgtctattcaaatgccattagtccatgatagaattgtggcgatatagtactgttacagtaagttctgggggaaatgttctaatgtttgaatagtcagtgtgtgcctgtggtcaagctccaccagaacatttgcatgttcatagcagtactttctgaagacatcaaaatgccgtattatgcctgacatcctcagaggactcagatcaccatggctgtgagaacagagtgctaacagcatcatgatgagatttctcagaattctctgaaatggtgcaaaacaatttctagtgctctttatggcctgcaagcatcatgttataattatccctaattgctgagcaattgttgtccccatgtattaagctagatgctttatatatacggctacatgcatttaatttaatcctctctactatccagtagcttgttttattgtccttactttgtatataagtaaactcagtggcagagagattaccttttaataagtacgtacctacaaaagattatgataaggaagtaaggaaaaagtagtcacaagtttggtcctgagagtttggggacctagacatgtattccaacctatattctagacctcgttattaggaaccatcatacctcctattccatctaaggcctctgcaacaccatgtcctcaaagtgcaaaaataagctctgtttattagtcatcatggttatgaacacttccttattaaatgtcttgttgagtaattagagaattcttttaagcaatgacatataatatatgtcattttaagcaatgacaaacatataaataagtaatccctttattaaagttatctggaggcttgtaaatagcaggtataaagagttgtgaagaataaagataaagtagacacaactcctatttgtgtgcgttcatgtggatgtgggcatgtactatgggtacaaacacatggaggcccaaaggctaacactgtatcttcctcgtttgctctctactttgagacagtgcttctcactgaacttggagccttggagccttaagccagcgagcttcagggatctacctggctctacactcccagtactgggattataggcacatcttccatgcacttggggcttctgggcgtctgaacatgggtcctcatgcttctacagcaagcagtttaccgactgacccttctccacagcccttccaaccctatctttcagggaagtgctgtaaaagtcttgatggtaatggagatttatggcctttttatttattagcttgtcatatcatgcaaatctttgccttatttgaagctcgattcatggtcggaaacaaattgctttattataggaatctttcagtgtaggtatatactctgtttatgatatggtttcttaggcatctattgttatagggtagaagtgtctttagcacctcagggcaggaacaaaaattcagttacctggaggcaaagagagagaaagagagagagagagagagagagagagagagagagagagagagggagagagagagagagagagagagagagagagagagagagagagggagggatcttgattaatgtcttttaaaaatctcgtttcattttacatttcttcctagccctaatttccaaattttctatgaataccataattatgcttctttaaaattcctgaacttttgtgctttttaaaaagggggtaagctattattccgaaggcataaaggggcatgcctaggaatttgggtaaaatcccattgcatgtgctcagcaggcattggtgggagtggtgtgtagcgaggggagccagtgcagaccggatctctctgtaactgtgttgtgtttgataagtagtgttaattatatttcagacccatcaaaccttcctcactgtggagaaatatgaggactctataggtgactggcagatattgtataatgatgcctcctgggagacgaggtaaaagtctattgattatttgtctgtgaagtcttgaaaacagttgcttcataatgtaggaaggacaaactaaaaagacttcttaatacatgacatgatatgaatgataccaaatttttaaggctccttctggccacatttaattgatttatgaggttccattttgattctattgactgaaagcagcagtgtcggcttccctaggattccgtacgaaatgttggctgacatcctttggcttttattttattgttgttggggggtagaatctagagtctagtacatactaggaaagtgctgtatctctgagctatggccccctccagcttctatcaactttgtttttcccatagtcacaggaattccttgaaacacaagtcagccttcttgtaaattggttgaaaaatgtacgagatgaaggagctgacatgacttggtagagttcattgtagaggtccttcatctgcttggttagatttattcctaatgggagtatgtctatgatctctttttcaatgtgtttattgttggtgcatagaaaagctattgatttttgttagctgatttgtatattgccacttcggtgaaattgttgattgttactggtgaaattttcaggtatcttatatatagtctcctcctcctcctcctcctcctcttcctcctcctcctccccacatggtttctctgtagctttggaggttgtcttggaactcactctgtagaccaagctggccttggactcatagagatccacctacctctgcctcccgagtgctgtgattaaaggcatgcatcaccactgcccatctttttctatttgtatctcttttattttcctctcatgcttattgctccagtgagtggttagaacacaattttggaaaggagttggaatagtgaacagccctgtctcattcctgatttcagcagattggctcaagtttttgtccatttagaatgatgttggctgtggatttgtcatatgtagtctttattctgttgaggtatattccccctagtactactttctctaggacttttatcatgaaggcatgttggtttttgtcaaatgcattttctgcatttattgagatgatcatatgattttgttgttgtttttaagttaacatatgtgattgagtgcatttattggtttatgctgtgtatgtctaaccattcctgcatttgggggataaaaccagcttgattgtggtgaataatctttttgatatgtgttctatttttgtttggaagttttttattgaggattttaagacctgtcttcaccagggatattggcctacagttttcattgtttgttttgtctacagtttcttggctatggttattcctctctggaatttgaagtattgcttctggtattctgtttagggttagtttagtgaacaggaattcttttagcctttttgtatcatcgaaattttttcctttaccttcaactatgacagatagattttcaggttacaatagtctagcttaatagtcatggccttttggaactcggaatgcattaatccaagctcttctggttttcaaagtttccactgagaaatcagctgttatatggctaaattttcctttatatgtgacttgagtggtttttttcttgtcctttgttccttacatttagtgttttaactatggtgcatcataacaagtttctttcctggtcttgtctatttgctgttttgtgtgcttcttatatctatatgagtgtgtctgccattagttttgggaagttttcttctattatcctattgaagatctcaagatcatttctatccattgatacgggattcattgctttcatctctgtctttatttttaacatgtgttcttttcctggtgatcctcagctacttcatgccctttcctgttgtattttttttcctattttttttttaatatttgctcatgtggtctaatttctttatctccaagtcctaatattctatatcctgcttgattcattctactggtatgttttcctttgagctttctagttgggttattgtattttttaaaactccatctccatttcatcttaagttatcttcaatgtttccatctctttattgaattcagctttcaaatcctggattattgtcatcacttcattcagccttatgcttgcattttcttgggtcattcaggcatctactctctttaagttcattggtttgtttctctgtgtcttccatagagttcttggatgaagtatatgattatttttcaaatgttgtgtcctgtgattcatccggataattatcattggagaacatttctatagcactgctggatttctaaggaagacaaattgtcttttcttttatattgcttgtattttttttatgagacctggacaagtgaacttcttcagttgggacagagcacaggatgagcaagcagggtagacctgagagttggccatggttcagctgtggtgaaatcaagtagtagtaggtgagcttgaactggtatacatccttgccaaagcctgtgggttggaggcagatgggatatagctaacttggctgggatgcagcattggatatgggactcagcatagatctggggaccagagaggatgttcaaagagtgaacttaccaggcaaggtcctggcataagatgtgcactgccacctaggcctgcaggttaaatgttgtatgggcaggttgaagtcatctggtaggaacgggacctgggttgttgtgcaggatgaaaatccatcattttaaagagcaatgttgtatttttttatttgtttgctttctattaacaggttttattggcacaagggaacactgggtctgagcaatgcaacaattgaatggtatattccagatactgcacagcctggaatctatagaataagatattttggacacaatcggaagcaagaacttctgaagcctgctgtcatacttgcatttgaaggcatttcttctccttttgaagttgtaactacttagtgaagagttgacagatattgaaaaaatagcttttctctgtgtagattatagagtgatttcacacaaatgtgaactaccagtttgatttttgtaactgtccctgcttgggggatagatagtttattgctagtgggacagatatgtgtgtttgtatgattgtgcatatgcgtgttcaacaggaagggggagggtgggagggaggaagggagagagagagagagagagagagagagagagagagagagagagagagagagagagagagagagattagtagtgaatgagagaaatcctctggcaaccatgcaccttgtggtcttcgtcctaaagcatgcttttacttgaggctttgtggttgcttaagagaaaattccctttaatatgaaatctcagaaataatcatagtatctgaggatatgtgaacaatgcttaacctatttatttatagacttgttgaatgagaacactagggaactttctggaaaccctctagattaatacttgattttccagaaaggaataaaatggtttaatttactttagatttagaattagatgattatatatttttgcctagttgcatttacaaagtatcatatatccttactataaatatatgagcccagttaaaatacacccagaaaattagcatgccagttcttcctgcattccaatgatcttagtcctttcaaacagtcactttgggatggatctgcctggctcagggttactgttcatgctcagatcttttctggaattgcctccagagtccaactatgtggatgtcacttacagtactttgattacaccttgtatttctcaaagtgtccttatcttgttagatcatgtctattcttccccagatttactctaaatgatttttaaagcttttcaccaataaatgtacctcaaactataaagctttgccttgaatgtaggttttaaaacaaaaatgttaaggctggaaatgcagtcatcaaaggggaagttttaaatgtatttatctgtttttttttttttatcagctacttacccactcatggttcctttgaatcatggagtagttatttagacaaatatatcccatgctgtgttcattgagatgatcatgtagatgaatcctttgaaggataaaataaatagtcaaccagaaatataaattctggagatacatttgaaaatcgtgaattttcaagtcatctattacatgttttctgtgctggatattatgatttgggaggagaggaaccccaaacaattttagatattaatctaaaagttttagcacttatgatacagacagtctaagaagtgagataggacaatctaacatgaaatttcagaaaatactagtttcatttaaaattatctaagttagttaagtcgtattattgtaggtaggtaaaggagtaagcattttaagagaaaaaatcaatcttcatttcaaaactaagcttgttttaaaaacaacaatggtaagacaagcctgcactttccccctatggcttgtatacttaaacatagtagaccaaatcaaaaggagcctggaacgtgacctggtgactccattttccagacagtgtttttctatggaggttaactgctgaagaatgaactagtcagggttttcaagggttgtgagaacatctatcctgatgagaataccctattaagtgtaaaggttcaaagacaacacattttgaaaataatttatctcaaaataaaatttatattagaagccatggtgtgctttaaaatgtacttcccatggcccagaacaatacattctccccaatgaggcttttctcaaaaatcccacctatgagtctctatcattggtatctacaccatggtggccattgtgtcacatatctgtgttcccaaccctgcatgaaaataaaccacagaaacatagttcctcagtagacttaatctcttcaaggccatgtgcttctaggttttgcagtttgaaaaaaaaaaaaaaaaaaaaaaaaccaaaacaaccaggtccctgcattgtacaaccatagttatctggacataaaggaaccccaccaggtaacagatctgatgagatcatctaaagccacagatcttgttggcgtctctgtctggaagtagcatcacagagccaaagtgtgtggaggaagctctggagaaaggctgtggagagtgagtggtggttgggttggcgagagcactgctttggaggagagtctgtttgtccaaatgtctgtgctttacttgtgccttgcctactctgatttcaagggtaccgtgattccttcagaatgcatagaataactccttttccaggtctatatttttgatgtatattctgcaaaacttgtcagcattcaagagaatatttaataataaattaagaattatacttggaaactgtttaggaaaatatttatttattatttaattaacactttttttcatttattttatataccatttcccctgccttcttcctgttccctccccctgccttccatctatcctcctccccatcaattcctcctctgtctccattcagaaagggacaggcctcccatgggcttgaagaaagcatggcaatcaagttgaggcagctcctccccctgcatcaaggctgggtgaaataatccactatggggaacatgttctcaaaagtcagctaagcaccagggagaggtcctgatctcactgctaggagtcttacaaacagaccaaactgtacaactgtcacacacatggagagggcttaggtcggtcccacacagtccatgagctctcagaagcacaggtaagctgtctctgtgggttccctggtcatgaccttaatcatcctggctcatacaattcctcctcccttttatcaatagaactccaagacctcagtccagtgcttggctgtggatctctgcatctgcttctatcagttactggatgaatgatctctgatgacaattcgggtagtcaccaatctgactacagtagatagccagttcaggcaccctctccactattgctaggagtcttagttggggtcattcttgtggattcctggaggtttccctggcaccaatttttactgtagcccggaaatgcctccccccatcaagatgtttctttcgttacccttcccttatgtcccgcccccaacctgcctcttgtacctagctggccagcctgctccctcaagttcccacactcccatacctcccacacccatcccaagtttacccaagagatctcttttatttccccttaccagggaaattcatgcatccccttttggactctccttgttatctagcctctgaggttgtggattgtaagttggttgtcttatactttactcctaatatgaattattattatattattaattataccacttatgaatgagtacataacatgtctgtctttctgggtccaggttatctcactcaagtgatttgggaaaagtagtttgtaataagaggtagtgtggacactttgaagaaagacagaagaaggctgtggttctattcttcaaggttggggtgggtagaatttcgtaaatagccactcaaagtaaatgcatccactcccagttctctcccaacttgtagaggtctgatgctgctaaagtgtgtagaacaggtactttgtgagcttcttggacaactgagaagtttccttggcacacagctagttataaagttatgagctgattctgaatagcaagaccaagaataaatttactgctgaacatccttttccaacctgctatcttatgttcctcatctaacataagcaagcccattgcatttcatgagtattaaaatgtgggttgtatgcttaaagaaaaatgccatcattagataatttcttcataactttagtgtttaaaaacgatgttcattcactattacttactgatttaaactggcttttggaatctttacctgaaaaaatttcagggaaggaaacagataatgccccacacaaagagttaagacgcacccagttctaagtaacaagatatttccaatcaagagtggtccagccagtaaacaatctcacatagggataactcttgaggtatgttctaactattcagtgacatcactgatactcttatcagcatattgctaccaattctttggcttattctctcagtcaaaggatcactctgtacagtttcatgcacaagtaaaaggggaaggaagactccatttaggatctttctttggaaggcagaaattagtaagaacacaaaaagaatccccattatatttccttctccagaactgcaccatgtgattggttattcatatcggcaagggaagcttggaaagagaatatttgtgttttctcctttgagagatgaaggaaagtcctaataacaagattgcaaagatagagagggcaacttttgaaggcacatcaacaagatgaattattttgtaactttggcgatttactttttgatccatgatatatgcctggcactcagctgtacatagttcatttttttaaaatgatacttccatcgttgagggaagggacctgtgactgggaaagtgggcatggaaaatcatgcatcagctcttgacattaccacatctcatatcttatttatggccacatctctagcttactataataagaagtggtcatacctatagtcccaacctattttctctttgaaataatgacaatgagtttgctctaggaaatgtatgttacaaaagccatcagaacaacagccctcaaaaggaactgaaattttcactggaaaaatgtatgtgtttcttcagcaagtttgtattgaacacctgtgtactttatggctgacattaaatctttaagataaaacacaatgaggtcacacagctgttctcttcattagtggacttggagtttaaaggataaagcagacagttcagtagacaacatgatgtacatcacattccccaatgctatagtagttcattgtactagagatgacaactcagtatagcttaggagtatatcctaatatactcctaataaaatgacctcttatttaagacctaaagtatatgaagaaattagccagaagaaagggaacattgtgtttgtgcttgtgttcaggcccagtattgtataggacaattctcttccattcgcccattgagaactggatgttactatgctttcccaaatctttcctcaaagttgtgttttgatactctatgtcagcatagtctgaattagaatgaggagagagtagagactattggtgtgatcaccaaggggtgatggaatgtagattaggaattggtgcactgtgttgggcatatagatattatggactgttccaggtagaagaaatagtgagcattttttcaaggctataattagagtgtaagaggacattagtcagagctctaacactgagtttgtctccatgagtaataaatgggtttctatttgcattttctccttgaaactgttttcttttccttcctttctttctttctttctttctttctttctttctttctttctttctttctttctttctttttttttgtattttttccgagtcagggtttctcagtgtagctttgtagatcaggctggcctcaaactcacagagctcttcctgcctcttcctcctgagtgctgggattaaaagcatgcgccaccaatgcctggcctgaaactgtcttcttatgacataaatgttcttgactgtatttgccctgtgctttaataataaacatcttttacagccaacagccctgactttagtttctggtggtattggtgtcacctcacccttctgtctttatgggttttaactgtttctctgtttgaactgaatttattaaaacttctctttttccttccacacacctcatgtttccaggcctatgatggcgtctgtttttcatttttccacctactaattatcatatcacatagatatttagtctgtacctcctgggaagatgccttgcaggttagctaggccttaccaaaggtcagacacgaacatgctcagcttctctgcccaatgaggtcacatattaaatagacctatggttctgaaaaatttcccaggtactccttatcctgaaatgaccttaagactttctaaatcatctgctccagccccaaactatagaaatatagtgtttgttaacctggttttatgaagtcagctgacctggtacccacttcctcatgacacaaccaccccccctccctacttccccacaagggaccttaaaacagtggttctcaacctgtgagttttgacttccttggggctgcatatcagatctcctgcatatcagatatttacattatgacccataacagtagcacaattatgattatgaagtagcaacgaaataattttatggttggggtaaccacaacatagggaactgtattacagggtcacagcattaggaaggtcgaggaccaccgccttaaaaacaacatgctttgcttttctttctgggctgaaattttacatgagtttctgtcctgtattgtcagggctgttgataaaactcttacccaaaggatgatccaaattcatgcctccctttaacttccctccctcctttaagcctaacactagagtatcaagtatggcctgtggataccactgggtgtctttttaaaggaggcccagagcttcatctaacattccataaatatttacaaatactaaaaaatctgagtaatacatacaaatgtcaatgtgtctggtcctgtttgatgcccagtcccttcttatcagttcctttttaagatttacaagtgtaacagaatctcatggggactgagggtggcttatgtgcataggatataaatagaggttgtgtgaagtagaaggaaacatggcctttatctgacttgaggttgaattgtggctgtgataatgagaaggctacttctttgcttggtttgtgaaatgacagtatcagtgagttttgatttctttaaagttagcaatgatgagaggatatcctggaagtaactggcttgcaatctaagttctatcattaaatagtgtcaatctttgaataaattatttttaaagacttattttgattgtgtgtgcacacaggtgtccaaaagttaagaagagggatcccctgcatctagagttacccctggatctaggcagttgtaagcaacctggcatgggtgctgggaactgaacttagttcttctttaacacacattctttgttgctgatccacctcgaaggccccagaataaagtaactttgtaaaatctgtctcttcaacttcataatctctaaaagaagaacatttatcatatttaccttttttgattataaaataagaataagttgttggcaccatgtttggtgtttctaggtgctcaattgacctgactgttcattttattgatggtatgcatgataatgtatctggaaagtaatagaaactaaaagcataaaaattcttcctctcagagccaaatcataacttccaaaatgttactatactttccaaaatcttttttcaaagttatgttttgatacccagggttagcatagtctgaaatatattgggaaaggagtagaggctgttggtgtggtctagaccttgaggtgatggaatgtggaataagaatcagtacactggtctaggaatgcctcaggagggtattggtgcagaaatgtctagaattaaaacagacatgatatattggttttctgggaaatgagacagggaggacagttcagaaacaatgaaattcttaaaatgtggatttggggataataacagttcaagttagagaaaggtaaaagagagcagatccaggaaactgtcaacagtctagctgaggacatatgagcctttgtcaaaatgtccaggtggcaaatctggcacaattggggaatatggagtggggaaactaggccaaaggttgggaggtcacctaaacatcagcgtcaagctggagagaaagaagctgatgactttgctaaaagaagtctataaaaggaaggaagaaaaagatttagatggcaggccttagggaaccaatcacatgtagaaaaaagtatgagggagtagtccagacaatattaagacaaaatggtaaatgtaggggtttgggaaggaagaacttcaagagagtccagtcatcaaatgttgcagagaactttaagagataggagtagagtaggccttggaaattagaggccagctatttcccaagaatggtgggaatttgcagggaattgagaaaatatgctgggtggatggctatggcagagatattgtggtggccacaccacatctgttcatgcattctcccattctggtacttttgggagagagaataagacatctggaagttgagatagctatctgctaaattctgcttaagggattagataagcaatgtgttctcatgtatgctcacagaagacacagacacataatctgccaaccagattcccttccttacagatgtagacattacatgatggcaagaacttggaacctgaacttcaattaatgtgcttagaaaagccccaggaaggctgtagcttaggtattttcttctctgaccaggacaaatatcaacttatttttgtaagttgataaattgggggagagtatttttactagctgatttgtggaaagtgatactgtgctggctagttttaagccaagctgatgcaagctagagtcatcagagaggaggtagcctcaaatgagaaaatgtctctgtaggatcaggttataggcaagcctgtaggatgttttcttaactagttattagtggaggagggcctcgctcactatggatggtgccatccctgggctgttggtcctgagttctataaggaagtaggttgaggaagccatggggagtaagccagtaagcagcacctctccatggcctctgcatctgttcctgcctccaggttccttcctctgttctttctctgatttccttcaataatggactatattacagaagcataagccaaataaacccttccctccccaagttgcctttggtttggtgtttcatcatagcaataataactaactaataggacagaagttggtaccagcatcacggggtattgctgtgacagaccttaccatgttgttttgaggaggattgtgggaggaccttggaactagtttattgaatgtggagagctcagtgggctgttctttaggaatgtgaatggtaagaacgttgagagtagtgttgatgatgaaggcctggcttgtaaagcttcagtgggaagcaaagactctaccaggccttttatcagaagaatttgtggtgtctggtcagctggggctaaggaatcagctgtggttatgaagaaacctaaaccactagagtaaaatctttgctttgttgggacaatggatgctggtcagctggggttgaataatctgctgtgagaagaagaggccagcattgttgaggtgaaatcttgagttagcacatagaagctatgcgctagaggtggccatggttgtatctcatgttggaagcccaacttgctagtgtaagagtcactagaggtactagttttgaagacatgaaaaggtcatggagaagatgaggcttggtactatgagacagggttggagtccctgaagagagcccagtggagtctattggtgaaagtacagctcagttgcagcaagagatctcagtattttggagatgccagtgccaccactgccaagaacagtagcagccatggagtagagtgggcctgaacttagggaggtgagctgtatgggctatagcatgtggaaccaggcaaaaggaccctgggcctttggaggagcccaggagatcatgagtggatccaagatgttggttggacattgagttatttatgcagttggagctctgtttgctttgattcaattgtgactgttccctgattcttgctccttgaaataagaaagtattttagttattttttatttcataggtacctacagttgagagcctttggatttttcctttaaaaaggagaccgaacttttaaagtgtttgaatttgtaaaactgtgaaactttataagtttataagatgttttatgttgtgatgttggtattaacgtgagatcttgggggtgaacaagaaaggaaatgttgtagcttaatagttttgtgttttgtgtcaagttgacaagtggtcagttgtgctggctagttttatgtcaagtttatacaaactagagtcattagagaagcaggagactcaaatgagacaatgcctctgttgaatcaggctgtaggcaagcctatagggcaatttcttaattagtgattgatctgtgggaacccagccctttgtgggtgaggctatccctgggctgatggtactggattctattagaaaacaggttgagcaagttatgaagaacaagtcagtaagcagtgcccctccactctcgatggtctctgcattagctcttgccttcagattcctgccctgtttgatttcttgtcttgttttccttcaatgatgggctacaatatgaacgtgtaagccaaataaaccccttcctccccaacttgcttttggtcatggtgttttatcatagcacaggtaaccctatctaggtcagatatggtgatttgcttttgactttgtcttgtctgagctgagttgtgctcctcccaaagaggtaagcgaagtcctgcccctgcctgcctgtctgcctgcctgaatgtagtttaatttagaaatgaagtcattccaaacataatttgtttcaaatatgttatactaggggagggtgaatgcctaatccaataacctggtgtgtttataaaatagtgcctttcaaagtaatgcttaggaggagagggaagcatggccatgaaggcagtggccacaaggatgtctctacaggcaaaggatgtcagaaatgccggcaaaccagcatagatcaggacagaggcacacagcatgctctctctctctctctctctctctctctctctctctctctctctctctcctctctctctctctctctctctctctctctctctctctctctctctctctctctctctctctctctgtctctctctaagtgtctcaagagaagccttcctgctgacactaatcttaaacttccagaccctgtatgcaggtggacttttctccccctccctaccagttcccaaataaccgacacagagactcaatgttaattataaatgcttggtagatagctcagggttattattaactagctctgacaacttgaattaacccatttgtagtaatgtatgggctgccccaagacttgtttacttcatctagaaacttcaggttgcttctttgcatctggcttatgacttctttgactcctccgttcttcttcccagcattctctctgccccgaaaatcctgcctagctattggtcaaccaactttttattaacaatgacaacgacatattttcacagtatacagaaggtattccacaccaactggagctgtgagataatgcgtttctatcctccaagcccctcagtccacagtgctttgttatgacagccccagcaaactacaacatgggccagtggcttgagttcctcctctttggcaatcagccaaaagagattcttgggtgccttcctatttagagggtctagtaatttattctgttctttactctgcccccacaaaatggccattttatagcaactgatatcatgtaatattggttagctatgagggtcgcctatcattgtcaagagttttggtaaaatctgaagctaatttacatattgtgaaaagtgaaataaatcagttggagtatagcactaacaacttttatagggagaaaatttgaaatttttggaattgatctttaatgacaatggataaaactatgactatctattacacacacacacacacacacacacacacacacacacacacacacacacacacacacacgagatggaagaatcaagggtagtatatttagttgagcttgaagccagttggtctttttcttcagtcttatgtaagttagtcctttctaaagcaattaggaagatgtcagtttatcatccatttacctggaagcaagccagaaacaaatcacaatgaatttaacgagttttgaatggctcaattttaaatgaaggcagaagatggttttacccatatttagaagatgctgcaaagagccatgacagtaaacaacctttcctccttcagtaactcagatcacatttaaggtgagtattttcagtttcaaaaactgcttttatgaatatggagaaggctttagagaccccattgagaagatggtgttccaattgttaagggcattttattttttatttttttggattaagtaaatagcatctcagccatcatctttggacatagaagggagtcttgtaagaaatgatgtattcctctgtggttgggagacatgtcacgtatcagaggaatctaaggtctccctcaatcttcccgtgcttctccatggtaccagcagagtgccatgagagccttgccaggaatccagttttaaatgactaccaccaagtgcttttttaggaattgacttcttatggaaaatttgaaatatatacactactataaaaattgatgtgatgataacctccctacctcaccatgcagatttagaaattttgtacatctcctgattgtattcctttttttcccctcacattttctggggtggggagaggttaatctgtataattctcttgaaaatagtgtttctttaacaaagactttttttttttgcttcacttaactgcaaggtcactttcatgtctgacaaattcaatgctccttaattccatctactgcatagttgatggccaaattgcccctattctctaaaggatgtctttttgtgctggctacatttaatcagtcaattctagctctgtgcttagcatttttacttgactcttatgttgaatttattataaaacagttctcacaccttcttttattcctttatttgtcagggaaaccatgttgtctactagattacacccccccatgttgtgacaaattccttcttcgtttgcttttttttttcttgtctttactgtttgtgggaaacacattcttccttccttccttttgtatttcttttttgtgtatgtgtgtgtgtgtgtgttgtgcaggcatgttcatgtgcgtgcacaaaatttggagccagaggttgacctcaggtgtccttctgggttactcttcactttagttcttgaggaatggtctctcaaggaacaggaacatgcaaattcagctagtctaggttctcagcttcctggagaaattctttagtgttgggattacaggcacctgccatactcacctggcttttccatggattctggggatctgaactgtggtcttcatgctggcatagcaggcaagccctttgtcattctagccaacatcagccccttatctgtttatttatttagtcccttttttcatacaggatctcagactagctttgaagttactatacagccaaggatgaccttggatctatgagcctcctatgactaccacccatgggattaccgatgggtgccatgacagcacacctgctttaaattttgattggattcagtttaagtttcgattggatttcatttctttttgccaacaaggctttgctggtaaacgtttattttttatttcacaaagccagagacacagagtatctgctttctcacttcagctatgatgatactctattcagaagctgtcagtctgatccattcctttaaaagatctctgtgaaccatagagtcaggcactttctccaaaaatggtttctttctgtctcccagaaaaagcagcttagaaaccactgtttggagacaggaagtgcctgttgctcctgaacttcctggtctcgtcagtgcagagaacttgcatgcctgcatactacagaaagaaagaagtaggaaagacagcctggtgcttcaaatgcatctaaaatgacaggggttggctttcatttccctgatttttatatttgtattagttttacactggaaatcttcgttccttcaaacattaacatttgtgctcatggtatgctttgaaaatttaaatttttattgagcatgaattgaggtgttgattagttttcatcagctagacacaaactagtttcacctgggaagagggagcctccgtcaaggaactaccttcatcagactgacctgtgggcatgtctgcaggacattttcttgattgatcattgatgtgtgagggtccagcccactcttggtggtggcatctctggacaggtagtcctgagtgctataagaaagcaggctgagcaggcggaggaaggaagtctgcaagtaaagccccatggtctctgtttcggtacctgccctgactgcctcccagcggtgcctgttcaagggtaagccagctaaaccctttcctccccaagttatttttggttgctattttatcacagcagagaagctaactatgacagtgactttttatttcattgtgcttgggttttgaatagagaaaaaattgtctttcaagttttaaaagacttttttaaaattcacgtgtcacccccccacctcagtgttataggtttttttttttgttttgttttttgtttttttttttttttgtttttcgagacagggtttctctgtgtagctttggagtctatcctggaactcgctctggagaccaggctggcctcgaactcacagacatcctcctgcctctgcctcccgagtcctgggattaaaggcgtgcaccaccaacgcctggcttgaaataaactcttctataagttgttctttttttttttttagggggtggtctggtatttttcatcacagcgacagaaatgaacctagaacaatgatattgttctgtagagtgtgtgttaacagtatttgttaggcattggtaacactgttgtattcactttaaagaaagtatttactaaatttcaagctctgcttctttttctatactgtcttagagcacaggtgtgagcaggattggctgatcttatttcatgaagttcttttctcaacccatctgggtgtgatgatttcaatttgctttattttatttcattatttttattaatgagaaagcattgttgtgattttcctctatttccctatagatactggtttatttcgtcttgccgtctctactaacttgtgaagaaattattttttctaggtcattttatttagattgccatttttaatggcaggctgtatacagaatagtatactacatattttaggtattttccattccccatgatttgtcaatggtttacatttgccatctcctctaggtggcctactctttccaacacccatgctgctgtttcctcattgttgagttgagtgtcccctgctctaccactaaagtagcttcctccccttttgtctgtcctctgaatttccttcctagcaatgcttcctcctgatttgacctatggagtcttctattgtgtgaaccactgtggcctcagtgcctaaacatgacccgatgggtagttatttccgtctaatagttgctaaaatgaatgaaaaccaatatttttgtgtgctgagactcaggtagcaggtttaaggaaaggggaatcctgctgcaactactgttccacctttggtacttttctgcaggaagcctttaagcaggagttatatggcatcttcacagttcgccatagtaaagacaggccttgatttgtctttgatgttaaacttgtctttctaaacacaagggtgttcattcaatgtgtctcctgtctcagtggactagatttatgaacaggcgaggcagtgtatctctagtggtacaaaatgtgtagaaataagtcaggatcctagaaaacatgaatgctcagccagctgtctgccaggtttggtaaatctagacagggttcagggaagctcccacaaagactgggtctttgggccctaaaccccagtgtccatggctagttctgattcacctgtagggcctctagtgtagttctgaccattataaaaattatttcaaggtgtgttacttttgtttatgctgcattcgttcaactctgtgaagctgtgattctttgcctgtctaaaatacctgatggtctaataaagagctcaacaacctttagagaggcaggagaaaagataggtgggactggcaggcagaaagtataactaggaggagaaatctgggaagaaggagcaagagaacaaggaaaggaggatgctaggggttagccacccaaccacacagccagtcacagaataagagtgaaagtaaggtatatagaaataaagaaagataaaagcccagaggcaaaggtagacaggataagttaagaagagctggctagagataagccaagctaagattgggcatttataagtaataataagccgtgttatttgggagctgggtggagggccccccaaagaagcaaagagcccaaagagtcaaagaattaaaaaaaccaaaactaacaactacatctaacctaaggttagttgggtgtttcttaaccttgaatgatgatggggatggaaattaaatggagaagaaacagtcttcataaatatatttcctgatacattctccccattaagtattgttaagtatatggaaagaagttaggtaaaaatttgtttgatttaataattttctgtaagtataaataaatttaaaaatattaatacactaaaaatgcccaaaagccagaaagaatcaaataataacaattgaaagggatgcatgggtctgtattattaaaattgaattaccattcctgatttgattatggctttggttgctcttatgtatttccagtctgcttctctgtgctatagtgggttgtggtaacttccaaatgatttctctgccatttgtactattgcattgagcagacatggtggcatctattgctctttacctggcacagaatatcaactacataaaagcctgtcttgcttcctttgatgatggattgtgatgcagaagtatgagatgaaagaaactggttcctcctctaacttgcattcgcttgtggtctttatcatgacaatggaaatcctaactaagacataaaccacttgctgagcattagatgactcttagcaaccctgagtcttgtctaggatttgcaagcctgtgaactctatggcaggtattataaataaatttcacctttggtggttttgttgacggggcatttggtagcttcttaaagaagtagatggaaggggttgagagatgatgtttgggtccatgggaaagtggctgtgattggacgacactgtttcacatgggccaggtctgagttagtggccaaaccatggactgtgcttgtccttctctatccatggcattatctaaataacctcctttgtgaggtacgattttaatggatcgtgtataagatccacttttctaatattagaaacattttacagataaatttttattgtttggttttatcattgtgcagctggaacaaagacatataaatatgaaagccatatgaggggcagaaaaccatactttgctctgctggactcaatgtccttctccagcacaataaacatcttcccttgcagtagacagagtctctgctctggaacaagggcctagaaaagaggaacattcaccctatggctcctgccttcactcactgtcactccctttgttggatctgcagcgccacctactgagcatggaaggaagtgtacctaggctttaacatacacatgggggacattttaggaaatctttgctttttattgaaaagcacatattcccatcccataatttagttcacttgcaaggtaatgttttgattgaacccatattataaggtctcactgttatttctaattcagtataagatataattatacacgctgtcaatgtacattaaatcatttgtttcttttcttagaattagtgttttaaataaaagacatgaagtttaaaaactcaaaacccaacttctgatgtctttcaaattacagaactacagcacatcatttgggtaccatttaggaggtgatggagtctgtgtgggagaagggagcaaactaagcaatacttgctgagttttattccaaattgacattgtctgcattgttgatgttgatatcatgacacacacacacacacacacacacacacacacacacacactctcacacgaacaaaaaaccccctctattatccaagaattctaggaattatattttttgggaaacaagacacctcagtgactttttctaacttgctgtctcttagatgtagtaggattcaggcattttttaaaaaagcatttccagtcctgctctcccccatatgttctgtatctgtgtcctggtctatacctcatggcagcctcatgattttatctccacttcacaacagagggagctggagttgagacaacaggaggtccctgtgcaaaaggtacagtttaaaaatgtaggctggaattcaagacaaagcatgtctgatttgtaagactacgctgctcccattgtgctggacagctactcagcaggacatttcagttttgatgcagctaaagacaagatctgcctgaccaggagagatataagacctgtgttctgcccgtgttccctggagggacaactcaaacgttcatgttgcagaaacaagttacttcattctgaatgttcgaacttatgtgtcctgcctgtgatggatggcataagatggcttatgtctcactcctcagcagtctgtctgtccacttcaaaagccaggacattctcttgaaaattcactccccgccctttccctttctcatttttctttccccattttgtttcttagaaaaaaattctgtagtactctcagggccttgtgcatgctgggtaatccttgtacccatagtcttcatccttgggcttcttgggagattctgaataatgtattagatatgtttcctctgatcccttcccacatctatacaaggctttgggtttcttagccgtgagagaaagatttaatttactttagttctctgagattccattttcaaacttatcctcctgaagagacaacagattatgtgttttgttagtaagaacagacataaagaacagataatcccagaaggaatgcctgagagcctgacccatgatgcagaatatattttcagtgatgtctcagctttgtctgctattccatggccatagataagctattccagaggctctctggtttttctcccgtatcctgcagttctttaccaactacatttattttacataatcctctttggagattagtatgactgagtaactgctgcccaactctgatatccttgtaggaagtggctccctaggtcttcacctaccagaggcattaaattgtgggtattgcctccttcagggcatctttgcaggttggcagtgaactcttcaatagttgacttggcatctgtgcaagggatgagttgtgctcctcgttttgtatgggttggggtcctccttgcaatcggggagtgtagacgccatccatgtcttactatgttgcccattttctccaatcattctgcgtatactagtgttttccaataattgccaagaaaaaagtctcttggcacaaaacccatgggatgaagaaggaacaggttgggaaactttaagacttcagcagatatgtaataaggcagttgtgaaaacagagatgaggaaggtacaattgaataggtatgttcttagaccacttgagttgagacagtctgatgacgtctagagggatccttaacaaactaccctggtaaaggagtctgctgcgttggtcaagaatgagctggtgctgatgtttctgctgtgtttactccttgtctgggaatcctagtgggaagtgtgaacttctcctgaaagatgggttagagctactgggactcttggtagcagttctttttaaagaaggtgtgagggggctcccctctgtggacactcaagtggttaatgacctcatctttcagttctggggtctctgttactgggatcaaaacttggttgtgccacttatcgtctatgtgatccttggtaaggtacttaatttccccaagatgtagttatttcctctcctttctccttactcactcccccttctctccttcctccttcttttccttttcctctaccttttactattctttccccagtccctctcctttcctctacttccctttcttttcctcattccaggctcccactttggttggcctttatttcttcactgtgtagcttaggctggcctcaaactgattgtcttcctgcctaaggctcctgaatattcctgaacattgtagtcagattgcatatgtttaccaccacatggatgagtgagaagattttcatgttagaattcacttgttttttttggggggggggaatataagtgacgaactgaattccttataaatcacttcttgaatgtgactctgctctgctattgaactaaaagggacaccatattttcttggggaaaattaggcagtatgcattgcagacagttttctgggtctataattgtgtctaaacccatgaataatggttaaactggccagacaggagatggccctttgacaagtctattgattagactcaaagatttatatgtggcaaacccaagccaggcttcaagacaagctatttaattatactgagatattctctctcattatcttccattttaagccatcctaaattacattaagtatttctttatctaattaaacataagactttaagaataatgcaatcttccttaatgaccacagggctatcactgtggccattaattattactctaggatatacagggcaaagcctttggaatttaaaggctttcaaatgttttgtctcctagttaattggtactacctacccattcaagactgtgtgtgtgtgtctgtatgtatacatacacacatatattaaatattagggtttttttctttctgttgccattttttaaagcaacatgctcatttccactctcccagttccaagaatggaggcttaatggtaattgtaatctttttgtgaagcaaggcaaagagtctttgtgatcacagttgaagtctgagagaccttgcctgtaattgaagagtatttctacggcagcagttctcaactttttggagttgaaccaccctttcacagaggtcacatatccataatcagatatatcagataattatattacaattcacaacagtagcaaaattgcagttttgaagtagccatgaaaataattttatggttgggtgtcactgcatcataaggaactgtgttaaagggtcacagcattaggaaggttgagaaaaactgttttagagggaacttctgaccatgggttccagcattaagtaattctttagtctttggtattatttaatattcctaagagtcatttctacactgatgaaacagaaacttgggagcaggggtagtgaaaccccagagtggggcacatcacatgttgtagtagtcagattttgttgaaaaaaaatttgcaggttagtaaagtaaatgagcaagatagttagccttgactttcagtttctctgcaatagtgggtaatgctattggttttcaggactgtgacatgtggataaaattaataaggaaagtccctcttgctgtgcctgttatcaagcggaaagatccttgttagtgttggttgattttctccaattgactgacatcctatagcaagattgaaagttgaagagagggaggagggaatatatgagcaagggaggttaagatggtgatggagaaatctacagctgaacaaagcttgtggaaactcatgaactctagactgacagctgtggagactccagggtaccgaactaggctgtccatatgtgaaggatgactatctgaagttgtgaagcttggactatctgaggggcccctggcagtagaactgtgatacaaacctggtacatgagctagcttgttggagcccattccctatggtgggatgctatgctcagccttaattcatgggagagggtctgggccctgccccaatctattgtgtcagactttgttgactcctcatgggagcccttatgtgtgaggggggtgagttggggatggcctgggggggaggtgagggggtgcaggaggaggggtgggaaggaggactgtagttgaaatgtaaaatgaaacttaaaagaataaataaattatataaaaaagattaaatgacaaaagacctcagaattccccaggctatttaaaagcatttaagtgtcattagctaagtagaccactggatgtcacacttgatctaagttattagagagaaactcccctgtacacagagttttgacagttacaggcctttaggacatgaaccattagcgatctttgaggccgagtttgaaaagttgcaggccgttgaaaggttttattttgcacctgttttatttgcttttgttttaattaaacttaaatgtattcagacaaaagatggattcttcagtctgatcaaagttgaccctgttaggccctacactcaggattcctgcaggaatgccaactcatttgtgtgacctacctttaagctggagtgtgggagcccttgatcttatgttaccgagaaagagcccaatgacctgacatttttcaccctttggtaagtcaacaagtgaggctggacctagaaccctgccccaacctattgtgtcagactttgttgactcctcataggaacccttacccatgaggtggagtgcttacttgacctttcagtcagtctgtgacatggagtaaagcatgacagaggcatcgaagttatgtgctattaagaactttctagcaggagctagagaaatggctcagggtttaagagcacgtattcctcttccagagggactgagtttggtctctagcacccacatcaggcaactcacaacctcctagaagtacaggtgcaggagcattcaacatctctggcttctgtgaaccctagcaatcacatatacctagcgtctctcatataattaaaaaaaaagcaactcaataaatctttaaaaataaaatttgaagacttagaagcacaatgaagaatgcaaagctgcctgtgtgtcctttggtgaataaaaagtatctagataaggaaacacagatgctattgcaaagaaagagaagaggggcttcagaaattcacaagagcgattggacagcgaaatgtgtgcttaaacagacaggcaaacggtgcagaggagcagggcagcgaaagcacagtgcaagccatggaactccatggtgcgggtgggctggggggggcgctcatccaaaagtaatattttgactttgtctgattggctttttgtttccttttattgtttcatagtatagatcattatactaagcaaaataagccagactgaggatgacaactattacatgctttctctcacctgatgaactagatttaaatgtatgcttgtgtatgtgcatgagtgtattgtgtgtgtgcactgtgtttaggctgtatagataggaaggctactctgtggagggagaaggaaatctaaagggggaataaaattgagagggtgatagaaaatgtgtattatgaaagcagactatttgggtggaagaaggggaatggcagtggggagaagggagggctgtgggaaatgcataaaaacaacaatgatgcatatgtataaaaatgccatcataggtacaatgaagcagatgagaagaattatcacccagctctgcctttgtctaaactccatctaatcacagccacagaagcttttcttcttccctccagccccagtttgggtgtttcatctcatcaatatttagttgcatcaacttggttgggactgagactgtggttggccattggaatatgatgcccaaggcacttaaaagagacacgttaccctaatgaggaagtctacaagctctaataggaaatcagcaagccaagccaagggtcatgatttatcccagctcttatcagaaaaagcaaaccaagagttcccttggagaactaatgagggctaatgtgagtacatatatgtgtgcgcatgcttacacacaatttaaatcattgtagctgctgaatggagggcgtagtaacatattgcccataccccattgctgtgtgggaaagactgggctggagatcataattctctctccaatttggtttcctctggtattgttgtcattagaaaagaagaaagtaggtagctaccaagacaagaatgactcaggtgttttgttttgtttttaaacactttgccaagtgagacatgttctgagagccactgcacagcttgtgctggagggaataccttccctggggaccaggaagtgcttcaggtgtgctgtgtaggccttttagtcagtaggaattttgaaacttcctgaggagtccactggcagtctcattaatgtcctctttggaaaaagttgatattcaaagcagtagtgcagtttatctgaagctatatagtattagagggcatcactcctgaccacgtcacaccacagtaccagaaaattggtccaagcatggaaaaggactggtggatggcttcaaagcaatttagctggactggtcatttttgtacccagagcactggactcttccttccttagtttttctgattgctctgctactgttcctatttcattcccagtttttggtagtttttatatagaggcatcagtgatacataataaggtacacataatgttctacaccttgataagctttgagagatgttcattgtcacaaaataatcatcacagtaagatgatgtactgatctcaccatactaaaaagtttcttggtgcagctgcatgtggagatgcatgcttgtaatcccaatacttgggaagctgaggcagcagggttttttgcaagtttgagctttggttggtttatgcagtgagttcaaagccaacttggattacaaaataaaaccttgtatcaaaaaaaaaagaagcagcatgggaagggggaagaaggaagggaagcagagaagggtggagagatggagaaaagaagatagaaagatttatactggcatctgtaatccttcccccggcctctcctccccaagcagtcattaatctgccttctcttacacaagtttgcacattttaggagtttatacacataaagtagcacagaatacatgctgtcttcttttgctcagcttcctttcttcccctgagaggagtccaggctgttcactgctgaggagccctctagtgtttgaatgtatcacagttgaccagcctgtttgttcactcgtccatggatgcttgagcttattttggttattggccattgaaaatagagctgctgtgagcatttgtgcatgtgtctctgtagggatatgtgcttttgtttctcttgagtcagtatctaagaagggaatggctaggtcacatgataccgatgtgtttagcttaagagtggctttcctgaggaccacatgataccgatgtgtttagcttaagagtggctttcctgaggtgtaattggtatatgcatatactttacatacataagttatataaattaataggttttgactcaggtaaatatctatgaaaatgtcaccacaatcaagaaatgagcatggggctggagagatgattcagtggttaagagcatttgctgttcttacagaagagttgggtttggttcccagcacccacatggtggcttataaccatccttaggcacacacaagggcacatacatgcatgcaggcaacacactaagacatgtaaaaattaaatacataaaattaaaaaataaaaaagacaatgagcatacctatcacatcgataggtttgttctggttgttctggttctttctatgtttttctgcttcccagcccccaaaccaaacacctttctgtcattcttgaggaatttgtttctgttttccagattttataaaatcctgtatttagcagtgtttggcttcttccatggattctcctgcacactatctggctctgaggagttccttggttttttttgttttttgttttttgttttttttttttggaggaagccctatttccacctactcaagtgactctcaggtcaaattgcaattgtaataaaggaagagttccctggaaatcactgtctttttataaatcttcacaccaattctagctacactgcctattgcagttttctgtccttatcaatggaggagaagagctgtggtcacttaactaagaacaggagtctaggagcctgagctctacatgttcttagagagaagatgcctaatttggtacattccatatcaggcaatatagtgagtgcataatcccagtcaaccccatggtagctctatgaaggaaatttataatttatccgtgactgacaaggaaacagaagcagagaatttaatttctccctaagaaaatggtgattggcagaacaaattcaatcctgactggtcccaaagctgtctcaggtcactcagtggacagcatgagaagcaaaaggccaacttgagctctgctgaggcgagccttgagtgcggatgagtgggcttcagtgcacaagcacaaaggaaaaaacaattttctacaattttgactgatctcccatatgtgaagatggttgaaaacaaaaatctccaggagttaaccctgtcattctagagaggttgaaacaaaaaaggccagactttgtaacttctgagagggccaaaatctctgtctccatcacctcttttattccccacaagaagttcttatagtgtctgggacatggacatatgcttggggtgttcaaattcactttgcagctgtgctggacctggtcaccttctggttggctctgccttggagcagggtttcaattccctgtgctcttggtttcttatattcatttttctttcttccctcaccttcatccttggctctggggccacccagtcccctcattgcttaagttgtcactgagaatccctatgtcccatctctagtctcttttattaaggagactaaaatcccccaaagccccactttcctcagtaagaacaggaaaaattttagactttgctctttgtgtatgatcatacagccacaaattcctttttttctttagcatccgtaatagtcatatttttcttttttatttagaaacaatcattttacatatcaatcccccattccctctccctcccaacctcccatgccccctatcaaccccctcaactcaccccccatctgctccccaaggatggtgaagccttccatgtggaaatcatcaaagtctgtaacatcatttgggggagggcctaggccttctctatgtatctgggctgagagagtatccctccatagggaatgggctcttaaagtccatttgtgcactagggataagtactggttccgctgttagaagtcccatagcctgcccaggcttcctaactggcagccacattcagaggatttggttcagtccaatgctggttccccagctttatgactggggtccctgtgctctcatcaggtcaggtcagctggttctgtaggtttctccagcatggtcttgactctttgctcatccctcctgactctctacaactggattccaagagtatgactcagtgcttagctgtgggtgcctgcttctgcttccatcagctactggatgaatagccacaaattcttgtttttttttttatctttttctttttcctaaacagctttttttggtttgttgaaaaaataaaaagaagaaaagaaaacattcttcactaagccatatgcaaacaggaaccatttttagctcaaagatcaacagacagaatttgttcccaggggacagtttactgatgaattttttccttttcactaaggattagcagatggccccaggtaaacattgacttcagtgcacactaacttgtttgaagtctttctctcaatttttagtttctgggtatttctttcactttcttggctgatgggaatatgatatatgttcccagagggtgctcaataaggaaatgacataaacttggagtgctaagaactaatcaagtgtacattgtgattatgtgccatttatatttggatgctttctgaagaaataaaattttagctttcaagaaagaaaaacattagtgacccatgttgataatttctaaaactttattatggaactgaaaaactcaattaaaaccacatcaccatcttgaaatcccatgaaattgcatcatttctcatttcttttgatttcttattctaaggtgaccagtatatttatttgtattttccaaagcaatgcttatttccccaataagagaatgacacataattttactatattagttagattctttagctctacaaaacattgtactcaaagtacaaaaataagtgctttatacacactctttaatactgttttttattaatctttctgttggtactctagataaatccatataaataacaataagatgaaaagaagcaagagactattaacacctggaaaatggaagtacagtttgcttaaagcttccttttcattaaaagataagaaataataataatatctgactatattgaagccacaaaaattcatttaaagtagaggtttcttagctgatctgaaaaaggggaaactcttggtcctcagactgatagctgggaaaccagcataggactgatccagaccccatgaatgtgggtgtcagtgagacaaccttggaactctatggaaccttttgtacttatctgtactgtggatctgtacttatctctagcatgggaatggactttaagagcccattccacatagagggatactctctgagcctagacagaagggggtgggcctaggccctatcccaaaggatatgacagactctgaagaccccctatggaaggcctcaccctccctggggaacagaaaaggtatgggataggtagggtgttagttggggaggggtaagggaggagggtaggcagagggaactgggattgatatgtaaaataatcttgtttctaatttaaataaaaaatggagagaaaaaagaggtttctgcatgagagtgattaaatatctaaacaaagataatgatgattaatttaaatagacatatttgcagcttgagctttcaaatatctcctaggaattataataggaaacaataagtttcaaaacaaaattatgtatttgcaacaggtatgaatactgctctgcaaatcatttactgccaaaacatggagaaatgtcttgttaaatagtgttctgaattttataaacacaagcatacttagaaaacagaaatacttaataaccaacatgttttcaagtaaataagcccagtgctaactgatgagcctcttaaatcactgtgcacattccttatatggccatagttaaaagaactaaacctttgctttctacttttgtataggttttggtattttttctgggaagaaatccttggaaacccatttgattaaaaaaaaaatcactgctcatgttgggtgggagcgctggaaacgtaaaagttaagggtagaattggtttatttggggggggtccgatcaagtggcaaaactaccatctgatccagtcatgtccaatattctttttagaggttgtcttaagaattagtttgaagccaatatgaatttcattcaaactctgactgtttgtgacatgattatgaccactaattgctgttggttttaactaagacaatgtatatgcattttgtatttggtgaaggttgaattatgaaggaaagaaaaataggggtaggggagatctacagagtctatagtccccatgacaagctgcatattgaagacacccaggaatctttacaaagcactgacatcaggccccactccatgacactcacatagtgggcatatgaccttgaccttagcttattgaacattctccaggtaattttgaatgttctgccaagtttaggagttcctgtgctcaacaacacgatgacccaaggaagaaagtgtaaatcagaaaatccagagccttctagctggagggtctcagctttagatgtccagctgcaattcctggaaaccaaaggttatgagacattcaactatgtttgacatttctctggctttgattggaaccagccagattttaggttccagaattccatttagaagttgacaatattttctgcacctttgtgtttgtttgcccttgagttctatagattttcatatggccaccttattatttttttaatgggaattctagcactatgtttcctaaatcactactaaaactgggatagtggttgtattcagtagtggattttgactttttgttttgaacatccataatctgtatcaagtgtcacatccttgtaacctccttttctggatatagcaacccctcccccatcaccatcaccatcagatgctctgaaaactcaggaatgttttggaagtaacacttttactgtactctgaatagtttcacaataaaaggactcagccatggtaaagacccccttcttctttaaaagaagatcaaaagaagggaaaggcaatgattcttggaggacttaatatgaacggtatggagaattcaaggctaacctaaagttaatatgattgttgagctgggtgtggtgttgtgtatcaacaatcccaacacaggggtgcttgagaaaggatcacaagttcaaggccagccgcctaggctacacagtgagaaaagcaaaacaaattcacctttgtctttgaaaggacttttttggccaatatctgatgatgaaaattttatgtagcatgttaggtaaatctgatttactttaccagtgtttgggttcagcaaaatgagcctgagatgaaagcaaatagtatgaacaagttcaggatttccagacaagaaaaagtcatttttcactcctgtacttagcactggcatggtttctgtaatttgggcagcctggggtggggtaggaattctgaaggaaatcagtgacttaaggtgttgaatacagggtgttgtctcaggcatatctgaaaaacataatattgatttctaaaaagtccccagaggcttagatgctgatctaagacataatgaggagagaaaattttcagagcaaaagtgacaatggaatctacaacattttagacagttttcatgaggcctgggattaccctacagtgtaggcgatgctgaatgcctcttataaagcctcctgttttcctatggtgagtgatgaagtagccatgagccagtgactgagacaggagttttcatgtctgccttgctctgactatctcgctctgcctggctccagcgcctggtactaagagagcttataccaatttgttagggttttatcaccttcccgagacacgcaggatccctggaagaataactttcactgtcaatgtctctttggatttcttttaagcaaaaggctccttaacatttgatttcattggagaataatattcatatttcatgagtaataagctgagtaagtcacacagtctcgggaaaggcattgctttgaaggaaggtatgacttatgaacatgagggatgtggttagaggttcacatcttctactgagcgttctgtaagtcttgttcttaggagaaagggatcttcagaaggctccatatgcatctcctctggtagtcactgcaaacgtagggtagacctcataggctgtgtatgctgccaagtcttgcccaagtgtcactgcttgcttgagttgggctgcagacacaggggcggtggcactggggacagcatatcctggaggaagaggcagaggatatttttttaaaggaattcagattccctccttttttggctcatggttttcttttagcaatatgaagaattagcatattgcttagaacaaatggtatgtatgatgaaaatgtgctctgagaagacatagtctgtcaactcaattgtgtagaatagcattggtggtttttgtttggtttgttttgattttgcttttttagatttttgacacagggtcgttctttgtagcccttgctaactatcctgggactcacaggtagaccaggctggtctggaactcagagatctacctgtctctgcctcttgagtgctgggattaaaggcaaacactatccagatggaataaaattggaagattaaagatgacattctccagagggaaccaacttccctatgtcagatgtatttcacatcagcaaatagagacatcagagagagggtccaaagaacagagaggtaccttatgttgctggccagcaatgcagaactttcccggggatgtatatacagaaatgtatacatgaggcgggctattgaggacttggcagggcataggaatggtggattctatgggtctgctgaacactatactgtcctaaaatctcactcttaaaatattaaaagtgtcagggtatggtggttcatgcctttaatcccaacatgccagggaggtggggacaatggcagcatgatccctgtgagtttgaggcagcctggccttcatggagagttttaggacaaccaggctgttgtccaaaaaagagagaccctgtttcaaaacataaataaaaatgataaataaataaataatataataaaaagtaaaaactttcacacaaagtgaataaacagagtcagggtattctagtagaggagatctgtactgtttttaggatgtcttaatcatcaccataaaacaagtaattttagctaattgagagcatgaaggtaggggagagggtgctgccacaataagagcacaagaagaagagtagagaagaggaaatggaggagcagatatattgagtagggggaggaatagagcaggatgagagataccatttcagagggagccactataggtctgagaagagatctggaactagggagatctccagagacctacaaggatgacacgatctgacagtccgggcagtggaggagaggataacctaaaagcccttcccctagaatgagattgatgactactctctatgctatcctagagccctcatccagtggctgatggaagcagagacagacatccacagaaatacactgagctgaaatctggaacctagttgaagagagggaggaatgaagatcgaaggggtctgtaccagcttggagaaacccacagaaacagttggcctgaaaaagggaaagcatatcaaccccagacactgttggggaggccagtgctggactgatccagcccccgatcctggatgccaatggggaggcccctgcactccggggagcctccggaggaggactggcgtttttccctgatgtgtgtgggggactttgagagaccatcccacgtgaagggatgtgctctgtctctggacacatggggaggggcctaggcccagcacaggaagttttggtggactttgtggagcccctgttgggggccctaccctgcctggggagtgggtgtggtgggtggggggggggtaggttggaggtggggaggagggattggggaggggagggagaggagaggggaggggacttacatgtgaaacaagctgttccctaacttgaattaataataataataataataataataataataataataataataaattatctaaaaaacaagtaatttttaaaaagattttttttgttaaaactgcaatcaggtttatttttatctattacagatgcataaaagaaccctcatcgcacaaaccctgagaattacacttttggtttgtttgctatttagaaaagtaacacaaatcacactataaaaaagtctttgaaattggcacaaaacattgttgtaatgttaaaattccagttttaaagctcagtaactaatgggagtagccttatttggatacatggagaaatgtaaaagctatctcgtttaaccaatgaaaaagataccttttctttctgttttggataagccctaagcatgctttccctggccctctggactttgtcactctttttctgcagaagtcttcccaatctcattgccttcgccgagtggctgtatgtggccccccagagcaaacagcatggcttactttcctttttccctatatcccttctggaagctgtccatatttatagcttgcttacctattatctatatgtctgtccatctgtctgctcatccatccatccatccatccatctatccatccatccatccatcttaatatctaaagtgactgtcctcaagcattctcttgaatccatttctaaaatcttacattaaacagaactcttagtgggaacctcaatttctctggtaacaccagtctttcagggaaagactctgtcttgagagatgaggtagaggggttagagagatggctctgtggttgagtgcatactgctctcacagtgggtcagacttttgatttgcagcactcatgctgggtgtccaactgcctcaactccagtttcagtggatctaatgcttctggcctctccgagaacctgcactcatgtaaacacgatgtaaagcacacacacacacacacacacacacacacacacacatacacacacacacacacgttcacatgtgtccaagtaaatcttttttttttttaagaggtagaatgtgataaaggaaagcagctgaccctgacctctggccttcataaacacacttgcatgcaaacacatacatacacatacatgcacacatttgcatgtacacacaggcaaatagacacaaagaaaacataaaaagtagaaacaaatgccaaacaacaactaaaggttaaccaatagcggccaagttgcttacccttcccagtcctaggcttctgtatctgtaatataaagggattgtgttctcacaaaactgtaaagtgccataggagtcactggggaaatatatagcttgctgagcacttcagtgagtacccagctcataggaagagctgttcaataccagttaataataagcaaatcgttgtatcttcttatattttacctttatgattgctatactttaaactgttaagttttaatcctcttttagactaaaaggggaattgtaggggaagctgtagccacgcctacttaggggctggctacaggtatgcctgaccacgccctcacaagcttttgagggcgtggtcaggggacgtagggtgactgcgttttcactttcggtttctcttttgggcttgcatacagactgctgccacgcgggctggctaggtcgctctgtaagtaaggcttttccctattaaatacccttatatttctacctgactccgtattggtaatttcccactataataccaaagtctcttaataagagggaaagaagaccaatctgtaccaactgggactcaggggtgttgactcattcaaggtcacacagctgctttaagcagaggcagatgggagccagcttaggctgctctggctcagtttccccgtctcttgtctgttggcagatggtgcaagtcagagttattgtaggtgaggttcctacaaagaagggacccccagacacactgcagcctccagtttctggcacaactgactccccccccccccgccagtacctgggaacacagtggcggatgtggcggtggctgctgtagtcccagtgtcagctccttctgtggggatgcctagggtctgtagagtgtgctctgctgcgtatgtttttgcttcatcgacataggcacttagcttcggaggtgtgaaagggtggctggaaaacacagtcagtcatgtcaattattcagaaacgtaggtacccagtcaggtaaagaaaaaaaaatcaaaggaaattttagcttttaaagatgattggataatgggattctgtatgtttttccccccttctgtttgttgtaaaaagtttctatatatacacaaacgggaatatttgggaattgatctaggaccttggtagccgatgacattcctggggaacgcttgtcatttttgctctatgactcttctaaggtatgagtggtccctaaaatatataaatgcagcctggaggtaaaatccagaagatgatatccactaacagatcagatctttgatataaaatttaaaaggtgggtccaaggtttatgtagtaaatagcaacttcatgagggtcacttgtatcaacttaaatgttgcaggaaggaacctgttttagtcctctgttcccctttgatctctacatagccctagtgtcccttagtcagttatcctagagtcttcacactgtatgaaactttggggcttttagacaccatcgaacagccagttagatgagcatctttctatttcattacattacaaaggtaacaggcttgagtatgtcattcaagtgatgatcaaatacacaaaacacacaggctaacctcattctaaaatctctagtactgggagctgggaaaaggtacccacattgcaggattctggctggccaacgctgggatagttactttgtataggaataactgtctttggtcttgtccaatggcggaatgcagctggtacactggctgtccccagttatttttctgacaaatttcttctagtatctacaagagtgaaaaaaaaggtttctccctcaaatgtcacatttgcattacttctctaacttttagtctccaaggtctgatcttcagtttcaactaatagaaaagagaaaatgtcatgtggtttaacgactcataaaatttaagttgaactcaatctgaactccatttaacccataaacatctattatcgttcataaaatcatttacacaccatttattccaatagttttagtttattccattatacatacatatcacacatacatgcgcttactaagagctccataattcttcatattttttgtgtatttattccagcttttaagaatttcgtgaatgtatttgcatattatccccccaccccaagccctggttcacagtggcttaggaaagttaactagagactgtatctttactttgtgccatttgtcatagggtttttaacttcacagttttgaaaaaaacatttttgattttgaaaagtttctaagatgttacgttctcaccttatttcaattatttttgttttatgtttatgagtgttttgctcacatgcatggtgccttcagaggccaaaatatctggaactggcattacagacagctgtgagccactggttggggatcaggaacctgacttgtgcccttcgcaagagcagcaagtgctcttaaccacagatatatcatcccagcccctgcgtcagtatttcataaaataaacactaataggtattcacagtggtcatttttttaaaatttacttggtaatgtaccacttttagctatttatgacaatccgctttttttattatccatctgcgtgtttagtttttcctgctaaaatcacccgaaactgaatcttttctccaaagactcatgtttcctttaccctaaagccagttctggtggagctgaggtcctgatcctctgttcacaagcagattcagtatcaagaatggtgcaacagaacgatagaacgatgtctccccactccccagagagccttagctcattgttctcatgttaatccagctgctgtctgccatgacattttccagtttattaatttgaagattgtgtttattttttcccattattaaaaagcactttgtggcatcgtctgttgtttatagagcatgctctgaggttccctagcaatagtcagttagttcttgctggtagatcagctgtctgcccctttttgccagttgagcaaacatactgaggggcgtggcctctgcagctgctggttgggcagggcaggtttgaaccccgtctactggctggagattcctacctctgttgtgggggttagtctccagccacagtgactggggtggcatgatcttcaaattttcaactatagttgtaaaatttcagagacaaattagttaagtacctctcattatggccaatgtaaaagcagattgttttgtttagaataactttttcaccatgatacatgatatcattgtaattatctgtttatgtgtctgtattatcccactgggttaccatatgatttatgattgcaagaacttttgttttattctttttagcatctctagggtctgccactcatggcacaccggagaagcccaagaaatgctttatttttaaacaaacatttcttgcttaccactgcaatagacattcttctatttattgttttcttaatgcccgagtagagtttgaagaagcattatgcaaaggtatatgaaagaaaaaaacatcatcagctcactctttcattctcaggtcaagctcttggacaactttgccccctgctcacagcccgaggctctttctttcaagctgtagttccacttttctccagagggcagagacgtttccctctacatccacagactgaaactctagccagccagctaaagtgtcttcagaaggagcagcatgtgatgcatgccaatgggataacctgggctgagcagggaccaagtctcttttgttgtaatttccaaacatggaatttagtttccctcatggaacaacctttataactttattggtttccaccaataaaacaaccacagtcgcacagaaatgtagaaacacagactgttaaatgaaagcaaatagcagctaccatcatgacactgcccaatgagaagcattgtggaagactctgtatgactgatggcaatttatagttaaggattttctaggttccatggtggaatgttctctctctcttgttttagtttttgatattataatataatgataacatttctctcttccctttcctctctccaaagccttccatatgcccctccttactcttcttcaaatttatggcctcttttttcattgtgtgtgtgtgtatgtgtgtgtgtattcctaaataaccttttctgtctgtatgatgttacttgcatgtatgttttcagggctgactgtttggcactggacaatcaaattggtgttttcttccctgggaaatgctacttttcttgcttccagctttatttcattgcctacagttctttgaggaggttaaggtacaggggacttttccccatccactttggtgtcattcactgttgttcttttaatgccatgtttctaagaaaagccctaaatagtctacatgactcctcgtctatttggttgttgaccagcctgctttaataagcatttattctgagctacggtctttgcttcattttattttcatttaagattctggttgacattgttttttttcatttttttttgtctgtttgtttttcattttgctggattttgattaaatgaaatgaaagtcctttcagtgccagagtggctgcagtctcgacaacactcctgagtgtgtgttaagctgattgtcacagaacagtagccaagcagggatcatttgaaagacggttcctggtccaacttaagcaccactggagtgatattacttacctgaggagcaagtttaattccttgtggttttaaagagacaggattcattggggtgagttccatcccaggtagaatgtcataaagtttgtcttctcgcttgtctcctttgacctggtatccacgacccaggccagtgtatgccaaatacccacggctgcccagtcctctcactcccgcagcccctacagggacattcatgtaaatttctaggaatgtaagaaggcattaaactgaatcaaaccaccagaaaatcaccctgaatcttactgtaatggaaaagttagcccgagtcacattgatttctgccctgaggatggacagataaccgaagattctaatgcaatgaaactcaacatcaggtaaggctcactgtagactctcactttcttaaagctcattgggaagaaaacagtctcttccagattgagaagtacacagccatttaaaactttgtcagagagaaaagtattttagttacccttttgttaatacttttttgttttttttttggagattcactaaggttcagtatgatcttattaaaacatcccaacataatatgaccacttaaattatagttagtctggtatagactattactgccattctgccagtaagccagaatgaatttgattatcacatccccaatgagtcatcagatcaacatttagaaagcattttttctttttgaagttcactgctctctctgttatacattgtcaatgtggggcttacgtttccattgagtttcatacatagatttcttttgatttttgttttgccacattgctacattgatttcctgttggtgacataaaagaataaaccactaagttgatcacttttcacccataaatattattcattgattgcttttttgttgttaaggctatatattattttcccttggaatggagtttgtttttttctacatcacaactggttgataacatataagatatgtggattaatgatgtattatatatatatgcataatgtttcagtggcataatttgttataatatatagaaaatattttcaacaaaaccttgattattacttttacattgcaacttttaagtccattgaagaggtcttaaaatgctcaatttgttcttccctgaaaaagaatgcaacacaaggtaattgtttccacaataatttggatgggcctcttttaagttatacccaagagtggatttaaatacatcctttgttcctatttttcagattgctgtcatatggggaaaacaggattgggatccagatgatgttagccataaccaagaaaaactacagcaaaagatacaaacaaggcagagaaaaactagcttcatatatatatatatatatatatatatatatatatatatgtatatatgtatatatatgtatatatgtatatatacacacatatatatatatatatatataatgcatatatgtgaatttactgagcttgaatttactaagctcagaaacctgttcaaatagagaattcagacataaaatatttttggtctgacagtgagatttattttgaatttatttggtttcctatctactaaagaaacattaattttctcaatagtttggttttttcaattttatcacaagcagtcagatgtggacacacatgccattacagttctcaggaggcataggcagacattgtgagttcaaggctagcctgaagtatatagtaaatccttgtcaccaacatatagacaaacatatggaataataaaggtataacatacatatttgggaaagtgttcatatgagaatgcctcatatatatgaagcatatggatgttaatttttgattgacatgtaaaggtggtgctcatcaagttaccatcaagtacataaatgccttcaagtgcttttgctgtttgaggtggtttctactgggccatgcttctctcccttaaaagttctgtcatcagtctaatcaggtacatattagtgccaggcagtggtccaatagagaggaagaagcagtgggtgtggcactaggttgtattctgtgcatattttatgggttcatgcaaggatctagtttgtatagacccattcacaccaatttctgacaagtatttttcaataaccagttgtaatgtgaaaaaaagataaaaataagagatactcatatatttgatttttaacaaacagttttctagcctttttctcccagtgaatccatccaatctgtctaaggttaccagagctatagtttatagttcatttgaactatagtttatcagtcatttgaaatttaggagttacagtaaaaccagcactgaatagtgttacctctgacagaaggggcccgaatgagggccctgttgctgagatgtccttttgtggctgggaaatgaagacttggaatggctgcataggcttggggggtatagaagacaggagctccaaggtaggctgtggtggggtcataaatatggcccagagggtaggtgtattctccttgcatcatagtgttcctagcacctgtgccccgggtgtacctaacataactgtccttgtccactggcttggccaaggttacttcaattggggaaccatccagcacctgttgtagacatcaaggaaaaggcaaactgaaaagccattcttacaactcagggtaacacaacatgtttactgtttgctgtattttcactgacttgcaattcttgatgtttttgtctcttaattaggttcataattctgtatcagtcgactattctctgagtggcttcattggtaattgcacaagatgacagtaggcttagcaatgctatgttgactactgaatttataataaggagagaataaatgagacataaaattattcaatattttgtattatgtatgctattgtgtttaaaattacatagttacataagtagaagaagttgtcgatctttatgggtggtaaacaaattacacagcacaaccaaatgaaggtgatgcaaccattaacaatatcttatcatttatcaacaccagtgtgatgaagtcctgtcaggactttccaaatggctcattagatcagctacacaataagtgagtatttccaggggagggagaggagcctaggtagatcctactcaaggaagacgaatctactaaactgttgcattgtccttataaagcaaatgtttgccttgctgagaaattgggagctaatgagtagtggtgccaggagttgggatataggtgaaagggagattgagaagcatcaagtcaggtacaacttaaaacatgcccttaggaattattgcagtagccaggcaggtggcatgcccctttaattccagcactagggagacagacaggaggttctctgagtttgaggccagcctgatctatatagaatgagttccaggacagtcatggataactccctgtctcaaaaaagccaaaataaataagcaaataaataaagaaaaaagaaaaaagaaaatgaaagaagttttgtaatacctggggtggggtggagtcttgggtttggaggtcagagaaaaattctctttgtcagctgggtgagtcttggggattgaaatcaggttaccaaatttgtttttttccagacagggtttctctgtgtagctttgtagattgggctagcctcgaactcccagagatctgcctgcttctgcctcccgagtgctgggattaaaggcgtgcaccaccactgcccagcttagatcatcagatttgatacaagaaccccatcttgctagccagcctgcaccatttcactggtctccttgaattataaatatggtcaatactttacaacagacattcaaagtctcactttgcctaatgaatataaatacccataggtatactaagaagcctaggaaaaaatatttttatattatgcttagacaacagttattagtatttactagtaatgtttatttaatgcataattagctacatatttgtaaacattgtcatagaaatgtttaggtacactggacacaatgtgaccagtcaccccaagctcctcttactagcttgagctcctttggaagaaagcagtgcattcaaggttattgataaatatgcaagcagtttaaaattttgttatggggaaaaagcatttttaatcacccatttgttaatatttatctgtagattcactaaggttctgtatatgcttattaaaacatggaaatgcaatatgaccacttgaataattacagttagttctgatttagagactgttacagtgaatgccactctttgtgtcagtaaatcagaatagattatcccatccccataccttccccaccacgatggagtgtctcttaaactttgagccaaagtaaagtctcccttccttgaaaacaaaacaaaaacaacaaaaatggcaataacttgggcagttttcctctggaagtattctggcatgttatttagtattaggcttatggttgctaggccttttcaatagaaactatatacacttaggcatgtttactaagagaaagctagctcatgaagtaataacatttttatggcactaacatggtaatcaatgaaaagtaatagtttggtcataggtacatttaaatatgaattgattttgctttatagtctttatagtctttttttaaaattttgtttcaatatttcagaattgccactttcttccctagaggacttaagatgttgatagtccctgaggctgcacatgcccctggcttccctgtgtctgaaggaatctgtgctatgaagcctttgcccttgtcttccagatccaatccccaccaatgtccagcctgcactctgctctggtgattactccatataaggtcctcttcagggctcctgggcccttagcattgtcattggatttggccaacaaggaactctgggtaaaaaggatagggaatgagaggacaatgaatttagggtgtgtttccctggcgccctctctgagaggtcatcttggactcactgtatttattgaccaaagacatttcagataaagcctcagggtggcatgactctagatcaaagtccccacgcccaccaaagggacttgttctccacagttctgtgtcatttcagtattcgactaaccctccagctccttctcctgtgcctttactgtcagaattctgtgaactctagcataaaacactacattttataatgcctttcctcacatttccagagtgtattccttgccacccattatctactggaacccggactgagaagactcagtgggtaccacagtctttggtgcaatctgctctcaccaaatttgctcttctcagatttcttctggatcttcttaaattctaccatgaagacagatttgcctggctgtaatatgcccttttaaagtatattcaattttcatagggtcttttgcatagtatctactcattcatgatggttttctgaatgttgatgatgaatttcttcatttgaactttctacttttaaatgatttctaataacactgaactgactactttgcagagatttttgtagccatttattatttctctagactttcagttctttggcctgcctgcctgctgcatgttccctgccatgatgagaatggactcacttctgaaactataaacaataccccaattaaatggtttcttttgtaagaattgccttcaccatggtgcttcttcacagcaacagtatagtagcaaggatgaggaaacatcttgaaaaactttaatcccctcttcctaagaaaattgagggctggtgacttgtccaagtcagaaaaaaaaatgagttaggatttgctatttagacacctctttgttctctttatcttttttctgttatttctcttttgtgcatccccaaaagacagctgttggagatgggcaaagctggggtaagatggactcctgagattagtctttggtatagcatgtccatatcaagcttggatggaatctgtatgcatttttctactacattaccttgccatttaaagctttcatagcttcaactgcatcttctcggttactgaaatgcacaaaagcatagtctctgatcttcttcacccgttccacagcgcctgtggatataatgccagcagcaccattagcaaactgagacagtgatgtggttagcttccaagtgtgtaagcaccttgtgaaactcctttgtgtgtcaaggtttaaaatgctgtatagtcaacatgagtttttgcttgccataaaatacttataatcttactaattagaaatagttataaattatgttttctaattcctagattataagacaatgaagggtaagaatggtatctttttatgtgttatgaaatataaaagataacactaaaggtaaagtattattaaattgacttgaatccagtttttggtcgtcttatacacatactcaactcatttattgcaaagtactgtttcatctgagaggtttaaagcaaggtataggagtaagaatgtgaaaatggagctagaacaaagtgattgatttctgaagagtgacctgctgcatgtaggtattactactgcatgcatggagaggagaaacaggtatatccaccagctgctgaattcttcccccagactctgttgtggagatgaaacattgcagtgcaataattcatgggagcgagagaaggtagaacttcacagcctatccccattggtcaaaatttaccccaggagtataatttaccctctgcctccatgtggttacatgaaatgcctgatcccaagttgtagcacgaatttatttgttagatcataaagtgtcaccacaccaagtcctgtgctggagcactcattcaagtcttctgagaagagaaggaaactctgggtatgtgggtgggcaatgtcacagagaacctgatgtgttttctgtgacagcctatacacttcagtactattttccttatttctgagatgacataaaaaatgttcagtgacttttctcaagttcatttgctggtaagtgattgtggtttcaatatagtctgattctggacactgtggaagactgaggttaaagactaacttgctaccgttagaaattttatactcatgcccctgaaaataccctattttattttctataaaataattatggaatttagggagactttggcagtgtgttatgttaatttttgttaaattaatttaacttttatggtaaatattaggagactatgattcagacaaaggtggattaataattcacaaagcacacagataaggtctagggttatatgtcctacactctttttttgtgatttttttaaaaactgaaattagaaacaagcttgttttacatgtaaatcccagttccttcccttcccctccacccctgcccccacactgacccactgtcccatcccctttcagctccccagggagggtgagatcttccatggggtttaaagtctgtcatatcatttggagcagtgcctaggcccgtgtgtctaggccgagagagtatccctgtatgtggaataggctcccaaagtccattcatatactaggcataaatactgatctgtaccaaaggtcccatagattgcccaggcctcctaactgacacccatgttcagggggtctggatcaatcctatgctggttaatacctttaagttaaaaaaaaatgttgtttctggaataatgtctgaaatctaagataatttctgtctgtagtatgggaatattgggaaaagttaggtatgtattaattctaccttgtttctgaatatacacaaggatttgcaattgacaccagttataccactgtagaaatagcaaaataaaacaagatctattttctcagaaatgattacacatgatacatttgtacaaaccccatttagtctttaaagagaccagagtagacctccatgtactcaaatggaaggatccaaacactattgtctgtttctaaaatttataagaggataagatatatgtgtctgttctaaatatctcaacccacacacaaattccagtatgcctatatccatagatatctggaaaggtagagatcagactgctagaaatggttacttcaggaatggagagaagtatcatggagaatgtaaatattttacatatttattgtatttttagttgtgtgcatatgtgtgtatgtgtctgtagttatgtgcctgtgagtgcaggtacctgtggagaccagaagagggtgttagatcccagggagctcaggctacctgatgtgcatgctgggaactgaatgggggtcttctccaagagcaatgcaagcttttacctctgaatcatctctccagccccaagaatgaaaacattttaattggcatagttttataaatattagccattttaatttagtttatcatgtcaaaacatccagaaagcagcataccccattcttaagtggaaagactgctgtgaatgttgatggtattaagtgaagaatagtagttacaccaagatgctggatgctatcttttaattgtagttgatgactcggttttcaaaacaaacttcttctttagttgtcgcttaagtggaaacttgtttcactaccacttgagcacactggttacctttcagcttatattaactagggtgtcttttaagcatctaggctttcttcatttacccatagttctcagggtccctttgatgtcatgctattttcaggaagaagaggaagaggagaaaatcctctctctcagactcaaggccaccaaagcatttagttctggcactctactgtatggtccaatgactatgaattaccttcctttggtaattacacattgggtggcaagtaatctaagtctaaaatttacaactttgcaggcatttgcttgtctcttccctaagtagtcagctcttggcttcttatgacaatcattatacagagcaaaattaatctggctagactgagaaaattaaataaaggcacataaggagcacaaggcatataattaactgagcttttaggtccatctcttcattacttctgtgtggcatggagtgaggacaatggctccattccacagcttgtgttgatgaacgagaagaaaggagtcagctaggatggcctttgtccttccattccactctgcacccctaatctatctatagttttccgaggggggtaatatgtttgctttagccacaaaaaatacaccttcacttacctcttacctagtgccaaggatacaatagctagtctcttagtaaatacacacagcaccaaagtattatcagcccatttccatatgctcccagcacccacattagtcatgtagcatttgtgttgataatgggtttgggtgttctgaaattcttgctaatgtttcaatcattatgcctgttttggaacgataatatccagacacctctgcttatggaaagcttcctttgagaacctctgagcacagaaagtcaattagaaggtaagggtttgaataacacaatgttgatttctcccatctaagaattaaccaggcctagccatacttaaagatcaaataagaaccagcacattcagggtcatagactagcttctgtgtaatagcagtggccatatgtattgcgtgcactcaaagatgatccataggctgtaatgctaagatttctttattcagataaacactagcccaaacacaagccagagagtgcccagaggttgcaagctagagtggccagagagaaggggcaccaatgtgttcgtggcctcttaagaattgccttcacatcatcttcgccctcccctgaccacgccctcatgggcgtggccaggcacacctgtaggggctactaggaggcggggctacagtgcctccctacacatatacctcacttcaacatactcctccctagggcttgcaatcagttcccatgggtagtccatcagcaaaaaactagatctgtgctcagaacacaggagtttgaaaaaaactcaacccactagcattagcttcacctgggaacttaaatacagacatgtagacttaaccagatgggtaagcaatctgtggttttagcagccctccagttgagtctgttactgctgaacagttgaaggaatcagatttcatagaatgacaacttagactacatgaggacaaaatattgatggctccggggtttttgtggcgattgccattcattttccagagtatcaatgtagcattttcccagagcagtcagggttcaaattatattcagggaaatacatgttttcaggaaatattcaagttcctccaaaagacctaaactttaaaaagaaaatttcaatgttttctctttccacaaattttctagtatagcctagtatagcctcaatatactaggtccttgcactggaaaatatatctgtggctttaatgtttttctccctgtaggaccatcactaattgttcctattcctctgtagcaggtgaatcaggataatctactcattgtaagcaccattatagaactctgagggctgtgctgctggcccaggaagtgccctagaaatttgggaatactttaggctgaggacaaagaaggataatatagtaatgctgggggtggtagtggttagagacatggaggagggatgaagaggcagagaagggacaagttggtattctttgttttcttatagcttctagaatccgtgtctagtaataaacaaatgtaataataataaataaataatatcaaataatatgaataaataaataataagtaataaataatgaatatgcaggctggaccaataaccattcactataaaaaaacccagtcttttggcagtttctcattctaacctcttttaaaacaaaagcaatattttacttagacaagaaaataagtattgttcactctgggaaaacaaaacataacccagaatagatgaaacacacacatacatactagctcctaggcctacacaactccattggcttgcagcactcctctgtatgtgacttgtcttaaacacgactcttctcttgattccaagagtaggatgacttagctatcgctttcctgtaaattccttccatgcgcagctcacatctgttcattcctcccacagtgcatggcattttggagctaccgaagaagcagcagctgcctgaatgaataagtgaatggaatgagcacaggtgtgggggttcatagagctgttaaatctggggtcttccagctgctagctgtgtgaccatttaactactctgggctctggtttttgtgtgtagaaaataataaacaccatgaaggaacctccacgctagggccattatgatgaatggatggtatgtggtgtgaacacacccactctaattctagtgcatttgtttttgcagtttctgtatcagttatggagtcacagctgttggtatgtagccacaccatgatactaaatgtcaggaaaggaagacttcttgaggttgaaggaaggttaatgtttgagaagtctttaaaaggaaaaaaaaatgctatccctgctaattatctacaaagcaaaccataagcttatcatcctattatacatgtagcattgtatccatttacagttagaaacagacaatctgagaattcaaagactgtcagaggcttaacataacagcaccacagcccacacttgtcagcatcctatcgaacttgccagaagcccaagaaactctcggttgtgggaagatgtttctataataatcacaggctggagtgactgagtatgttcccaggcatactgatggaaatgactggagatacttttggctgttatctggggtaggttgttagagctggcatgtggtaggaatggaacttgcattttgctcaataccctaaaatctacctactgatacttatcaccaaggatgatttgttccaaaatttctgggaaaccttgcgttggttagacctccagtaagaggcaggcatcactaacatagtaaatgtttacttagttcacagtctgaaggtctggggactgaggaactacctaaaggaagaagaactcagagtttagtttagcagaagtaatgtgtactattaagtaaccacacaagtaaatataaatcataatattcctaaatgctgtaggaccatatgtctctgtctgatcctcaaatggaaaaataattgaacaatatgcaaccaagtaggagaaggggcttaataaaagatgttctctttaatgtcatgggtaataacctttggcccaagtgcttttaaagtacagtttgaagaggtaattactcatgtgtcctacctggtttaatactgttgaattctttttcaatcatctcttccgaggtagacagcatgagattccttacatacaggattttcactgaagacatcgtgtcttcatcaacttcgacttctggctctgcccagtctactgcaataggatgtccccacaactgaattctccctgttgacaatgatcagaagaatgattaattatttagaaatcaggacatcatctcagctcacacagatggtcttttaaattgagctgaccgttaaggtcttaaatgactaagaccactaaaaaagattactattgattttaagacattcaaataatgcaagagttggatagaagagacttctgtgtgactagtggcttatcataatgatcgaatgtaaagagaagtaggatgtggtttgaaatggaggagaagcgaggaagcggtgggcacacgggactctcaggacagcttttacaaggcgggggtaattttaaggtgagataataaaagggaagaacagctgagagtggatttagtgcccagacacagagtctgactccatgaagcattaagaggtcactgggacagcatcctctgtagttgaactatattgtctattagctggagaccaccaatgagacatttacaaatgcttgggtaggagcaagtattctttgttctctgtccctcatgcttgatccagggctcagaccaactgtgttccttctgcatcctctgtctgaacacggggaatttgggacctcacagataacctatttttaaaaatcctgattcagagaagacttaaggaaaagttgatgataagaaacttaactcttcttcaaaaagtagttgcagtccaagtcagcacacactcctgttctcttacagtggtcacttgctggatgtttctcactatattgtgtatttcccaggagcttctcagctctttctgatcctgaccttgtggaaggaggggcgacaccagtttttacagcctcaaagtggatcacttgacagaggaatttccctttaattacttctctcccctttgggttttaccactcagcacccagattcctggagggtccttgttgaagtggtgagataaggatgagaaatcaactcaatttccaaattttatgggaaatctgtttttttcccatttattgattggaagcaagctgtattttgcagagagcacagaacatgaccaggggaagaaaatatccatccttttattccttaacaaccaatcatgatctttgacataggtgccaagggtatgcaacatagaaagtatcatctttttaataatagcactagggagcattgggcataatggttcttgtgaggctgaggcaggagtagctcaaatttgaggccaggctgtgctaaataacacaattaaaaaaacacaacaaaattagtgggtaaagtgggtatcacaatccatgtgtagatatcaggcctttattcttttttatatataatttttatttagaaataatcttcttttatgtatcaatcccccgttccctctccctcccattctcctactccctcccctaaaccccagcccaccccacacactccccaacaggcctttgttctaaaaacagtaagccagggctggagaaatgacatttgctgctcttctagaaggcctgctttcagttctcaaaacctacagggtggctcacagctgtctgctaactccagtcccaatggatccagcacattcttcaggcctccacaggtaccaggcactcacttgatatattggtgtacatgcaggcatgacacccccatacacataaaaaataaattaaaaaaagaaatactaactcaaatggataaaagacctagatgtcagagatgaaatcatgaaactactagaagaaaacacaggataaacacttcttcacactggtttgggtaatggttattcttttggcaatgattccaaaaggcactggtaataaagtaaacagaggctaacagagtcagatgaaattaaaaagaaccacctggcaaaggaaacaaggtgtggagagacaacctaagaagacttttcagtagaaggaaaaaatctgaataaaatggcaaaatattaagtccaagtcactaagagactacggatgctctctctgtgagccttggtcactggctagtgcactatgggaaagctgcaacacaaaaaagatccatcactttaataaattcggcaatttctagattttatacagtctttctccactcagaagctagcatctaaatgttgaaagcttctaacagactaacactactgttttgttttgtatttaagagtatgcaggaattcagaacccagaaataaactgaataccaaagccattggtatctaattgttgacaaatgtgtcaaaaacatgcagtgggggaagagaaaaaagccagcctgttcaacaaatagagctggaaaaactggatatccagaagaatgaaattagatccatacctttatctctgtttaaaaaacaaaacaaaacaaacaaaaacaaaacccaaagtggatcaaaggaccttaatttgaaacctaaaactgctagtggaaaacatagggaatacacctcagaaagaactttcagaacagagcgccaatggctcaggaactggccccaagaatcagcaagtgagatcataagaaattaagaagtttctgcatggcaaaataatctatcagcagagcaagtgggcagcccccgagatggggatggtaaaaatcgttaccagctatacttcagaaaggtggctaatattcagaatttgtgaagaaaactgaaaaaactaaacactcctccaaactgccagtcagcaaaagtgctaatgaacagagacagttctcagaagacataacaaaacaaaataaaataagacaacaaacaacaaatggccaacaaatacttttaaaagtgctcaacatcccttgtacaggaaagcatattttgaaactgtcttgttttgccagttccacagtcactttcctgtgggtcctgcatgtccaatttatacagcaacaaacagtccaggcaagagcagtttcttgcccaaatggctaatcttgccatgttgaaggtaaactccataatgagtttcttcaatgcccatcctcctttctgatgtaattggtgtgccaggagcagttgtgtctcattgccaagaaaaaccctaaaccatttaaatgccatatattctgtctcaaatacatctctgtgtatctagaaaacctaactgacctaattataagttttgactattacaggtgactatataatctgtatttaattatgcattatatttttaaaagatctgtacaaacgcaatacctaaacaagaggagaaatatacatatcacaaaactgacctcaaattgttgggtttttaaactcaagaattgatgtgggtgcccacatgtgtggctggagcacctgcaaaggtgtctaagaagaatgtttatgtttcttctctccagttcgatggcaatgttttagaaattgggaaagacattgataatatgtttgccagttgtccatgggatggtgtactacaagctgctgagtgtagtataggttgaacatagcacaattctaactagcctgtgcatttagtctacatgaagctatgtctgtgatgaatttgtttaatctttttttcacccttttaaaatttttactttccatttttctgttaatttgttttcagatttgttttatcatacggagattactcactgaggattctccgtaggatggctactggtaaaagttctcctgatgtacagatgtgtaactttccaaagcacatctgagaaaactttagagaactaaaacaactgggagaaaaatgagtaagacgaagggctgaaaggcagcctagcaaggaagctcaaacactgcctacagaggcctgcagtctgcatggagcataacacagcctaggagggtggagcacagcataactcaagagggatgctcacctggcagcagcctcctcctagccatggcggctgcacggtgactctcatattccacaaaggcaaatccccggtttttggttttatctgccgcgcttgggtagacgatgacgtcaacaactccttccgtgacctttttcatctctaataagatttcttctctctttttggttttggggattcctcccacaaacaatcggcagttgtccacactggcacagactcctaggagccgcccattcctaagggggaaaaaatgcagttctcgtaggtgagaatccacgtgtaacggaggtttgctaatgtgtaccactttcaaagactgtttcctttagaggtccaaggatgtttcaatacagactaacacccttttctctggtggcttgaaaccagggccttgcagtgcctggtagattaggccactggtctatatacgcagtcctgacctcggaactttttaagaaagaaaaatagacgaaaagcttattatcacctggtctctttagactggatatgggttctccacttgccgtcggttctcaccgcttccccatatcccagtaccaaggctgctatactaggcgctgttcctcacttctccttaacctatgccactggggtttgccacgcctcatgattcatgtatatcatcaccaggctgagaagctgttctgatgtgatcattattaaccctccccaaccccaatgaaagcaaaattgaaaagaaccagcaaaattgttcagtgggtaaagttacctgttactaagcctgttaatctgaattctatctctggactcaatggaggcaggctagaatgaattcattccacactcatggtacacacacatacacacacaaagtaaataaaataaaataaaataaaatagaaatagtctcttgtcagtaacagatgattttcctatgttagttgtcccatacaaaagagcctgcaggatgagtaacataggcgtgattgctgttttaaggacaacttgagattccaagaaatgaagtgatttggttaagggtcttactgattctgagaggtaaaattggccccagggcctcgtttattctactttgtggctttgcctattagtaagatagaggtgccttcgctggcatggatagctgacaaaagactgaacagtgctcctctgaaatagacagcaaacaaaagtgaggcccaagccgtaggtatgaagatggtcaccatcattaaaacatccaaactgtaatgagcagtgtctcacagcacaggcatgttctaaggcagctttggtgagatgatattttcttgtgcctggacactgactcattgagcaccatagtacattatccctgactttttaaaactactttcctagttttaagtgtatgagtcttttgcccacacctatgtgtgtgtatcagaagagtgttttggatttcctgggactggtgtttcagacagttgttaaccataatgtgggtgatgggaaccgaatcagatcatcaacaagaatagcagtgctcctaactgctaaaccatctctaaggccctgacccttggcatctgatctttccatgccgatgaacaacggtcaaatcatccaaaaatgtcttctcctttctaagtgtcttctaagggtggacattgttgcttctggctgagaacctgtagtaaagggaagatgggctttcatactgaaggatgctctgcagccattaacaataatagtaacatggaaacatgtttggcaatcacgaagcactctacattacactgatcagtttttttttttaaaataaagaatgtaagaataaatatgtgccattctgtttaaaaatatgtagaaaatctagaaagataatcaagtatcaacatagtatcttaggcactagggttatggatgaatagttttttgggtttttgtttgtttgtttgtttttttcaagacaggggttctctgtgtagcagctctgactgtcctggaacttgttttgtagaccacgctggccttgaactcactgagatctgcctgcctctgcctcctgagttctgggattaaaggggtacaccaccatgcccagtgtggatgaatagttttaacttgtatactatttgcttttttgatgttttatatgtgttaaattaggctatgggttttataaataacttgaattactgaaaacaatgaagtatccttaacaaaaactccttgcttgtcatgagtaaaaggtcttctctaggcaagtgggagaccagtctgcttttcttggaactagtggctcttgattgtcaggggtcactgtctggctattgcttatcctttgcagaggagccaagggcaggagtcagaattgacaaacccatctcactctgaccacattttgcagagaatgtgctttcttgggtgagaatggggttcataaagtcatcttcctgttgtcttttgatttattatttcattctgttttatttaggcagaagcttaggctgttggttccaaactcaaccaactatgaccttgatcttccaattcttctgcctccctttcccaagtgctgggattgcaattgtataccaccatactggcttatgtggcccctggattaaaagtcaggcttcgtgcatgctgggtgggctctagtaatgtgtattttaaatttagccctagttatgtgtattttaaattttacttaagaaagcataaatacatctctcacttatttagagatcatattttgatggcttgtgggctcttccggtatcagttgctaatgggaggagtctaaaatgtctaaattgtatgactggccaacatcctttcccagaattgcctggagacaaaatgcaatttctcacaagcttaggacatgactttaatgtctgcagaagccaggcattcagaggatgctctgtgaatatttgatggggaggaagatgatgtgataaccgtggatcttttctgggtaatagcctcatccatcccctgagaaatagtggctgacagcaaattacaggttcttgttcctttctggaaggaagattttctctccagcagactgaccaaggcagaacggaagttgtgaaggaagctctgggtctcttcctgactagttcatattgaatttatcccacctcataatttgtaaaggttctctgttcctttactttgcttctggcttccaagaggagactggcctgtgatcttggccactttctctttccaaattctttaccatattttttttcctttctttcctccccacttcccactactgtaattgccagttatcttacagagcacctggtcctttgaggtgcagagatttagctattttatcttaattctttttatgacatcttatgagttttctagaaaagacagtgaaattcaagaggagactgttaatgaacagtcatctcagtagtgcaatggtatttattttttaaaccttctctattttcagtagtattggctggccccagtgggtagctatggattgaatagataccccaagttatcagtctcctacacaaccaattccatgtgcatttcaactcaaaaggcactttgggctagcccttactgatatttcatccttctttcacagaagacccagggaagggaatcttgccatccctgaaaccacagaactaggacatgagttctgtttgaggggctaccttaatctagcagaactattttttaaaaatggtatagctcttaatttgttttaaaaatgtttgtttgtttagctttatgtgtatgtgtgagtacccacatgcatgtatatgcatcatatttgtgcctgatgcctaggcggctatgagataaagtcagaacccctggaattggagttataggcacttgttattttccatgtgggtgctgggaactgaactcaggtcctctgcaagaacatcaggtgctctttaaccattgagctatctttccagccccctgaatgcttttatttgtgatttcatcataaaataattttttataattctgatatttgaaagcaaggttaaattatagttttgcatagctctttccacatttgttagtgtatattatttttgtatgatgtttggaacatctctgtgtgatgtgaccaagtgcaaggataaaagcgatgttctgagaaggtaaaggggaaaacactctaggtctcctaattgtgaatatagtctatacatcacacagatttcttttgggtttgtagaggtatgtgtgggagggaaggcatatttgtgctttctctcagactctttcagaatccaaccttaagattgactagctgagcagtgaagtttgccacagccagtcattctttatgtaactgaagctggatttttggtggtgcatgccttcaatgccagcacttgcaaggcagaggctagcagatctttgtgagttcagcgccagcctgggctacagagtgagttccaggatggccaaggctagcttttaatcacttcacaggattataaggatgcttgtgacctcatgtactttcatataagtagggaaaacattagagagaaagtcactcagcatttatcagatttaggactctgccaattttaaatttcacctgcattgtagaagagggataaatgtggaaaactggatcttggtttgaactatggtaacttttatcatctcttggttaggacagtatgaagttttcgaagctctttgaatgatctctacaatttaagccaggagatgaaaagttggggctggagagatgggtcaatggctggagcaatgcactcttacaaagggcccaatttgattcccagcatccatgtaggattgagcacaaccacctgtaagtccagccgtagcagatcagttgcctcttctagactttgcaggcttgcaggcacgtgcatgcatgtacacacacatgtatgaggacacacacatgcctgaggacacacacacacacacacacacacacacacacacacacacacactcacacacacacttaaagtaaatcttaaataaaataaatgaaattgattggcaaaaaggctaaactacttgctggcccttaagtgaagcttggttgacctaaagatttgctgtttcactggtcctctcaggtggcctagggcttcctttaagaaaggatttatggttttgtctcaagtgaagtttagaacccagacagttgttgggcgttggtggtgtacacctttaatcccagcactcgggaggtagaggcaggcagatctctgtgagtttgaagccagcctggtctacaagagctagttccagggcaacctccaaagcaatacagagaaaccccatctcataaaaccaaaacgaaaaaaacaaaaaaagaacccagacagttttataaaaacagattattgtttctacattgccagttatgtcctggggccttcctggggccccatggttttaaatgtcatagaaatgctgtcaccatgactcctctcctgcttccactaccatacagtcactttcccctagtctctccatcccaatggcacacccactctcacagacacttgaacccgaatcccatattctatccttcagttctgggtgcactcacactttaaatgccttatctagtcacgatgctcccctcttccagcttccccagtatgtctatctagttcttaatcctttctgttactttcttgtgatccctcatcgggtcatcatcagtcatcactccttatctaggtctagaatgtacttcaaccttctacaaggtttccctctttcagccccggctcaactgttgttcactgtctatccaacagccataacaatgcttcaaaatccataaagctaattaaaattcttttctccttctaggtcgttatgttagtaaattctgattcttcagcagggatgatgttctccagttatactgactttaactattttatctccttccccttctggagttttcttactctctttcaaacatgccaaacatcaaatttgttttaattttaggaattttgtgctttctatttgttgcttttttcccattaataaccttgtttgggtctgattgtcttgaccgaatatttcatccaaatgtcagatccaattttactttctcagacagtattttcttaaaacagtcaaattcaagtagcattctcttcacatacctatccctccttggttttatgttttcaacatctttacttcatctttgtgtttgtgttctatgggaacagcagataccttgatatatttctatctcctgagcagtattcaatacatattaatgaaattagttaactaataaactttatctctgtgaactttaatacatcacacagtaataagcctaaataaatgtttagccagatcattttcaccatggaaagatctagcattttatccagtttggctaacttgtgcaatactcaattaaataaatttgataggaaacagacacaggtgaatttctggattcattctgagtctagaagatgaggaacttacctaatttcataattattaagttgcttgattgcattcttggcttcctgcttatttgagaacgttacaaatgcatagcctctgttgttgccattaaaatccatcatcattctcatttcataaattttaccaatctgcaatgaatagaaacaaaacattcctatttacagatttatcctcccaaatgtatatgtgggtacacacacacacacacacacacacacacacacacacacacacacgatgtttactgaactgtctcctgccatatttgacatttgtatccatgggggatggtttgcatacttttatggtggcttcagattagttatctaactcttgggaaaaaccaagattaaaatatagacaaatggcatttcagccccagctgatgaattgtgcttctggttgagcaaatgacctttgtcatacaactatctggagatttatgtactgtcttagggagaccaaaatgcatttgtcttcagaagtacattttcttgctagattcacacaggccttgtgagttgtcttctaatgtctccctggattgacctttacttggttatagtctgtcactgacatttaaaacaggaaacacggatactcattggggacctgctaaactaacttcctggctgccatgatgtcagaatgaatataatgtacctcatagggaggtctcttattttagcaatttctaggttggaaaggaatgctagtcttaatacaactgacaggaaatcagaacctcacagtaaaagagcacttgctttccgtccattctatcacccttctgcttgcccttactctccttctcctggactcctactatcttgaactaatccaagctaggcagtttattacccccaacttctgtaagcagggtggttcaaacatacagtaggtctatgcgaggagatgccagtaagcctgttcattcctcagttcttggctgctctctgaataacctcactctactcaactctaaagaactcattgagaagcatctatttattctccatggaagagtgaatgttttcctctggttcatgtgtcacccattctcattctcatgttcagaataaaaacatgtacagggtttttggtatgctctctgagattctgtgtataaaatcagtggctttgaaccgaaggctgcacatcatgacaactgatttttgtcatttaggggaagagccaaattctcatgctaaatgcacctggcaaagtattaaaaattaactttaagactgtatttttttctaaaattttgagaatagtatcaaaatgccgtttggaatgaaggaaatattttccttagtaatcatgtgaggacattgaataactatgttcttaatatgttcagtgcattaagtaagataaccttactcaatcgagtctacttgcagaagaaaattttatttgaataaatacatacaggcacaaatttaagctatgacaagcatgcataatttcttatatgaaatgctgcactttataaagtcatattaagatgtcaagttggagcagtatcttatgtttgacaattgctgtactgttctgtattgttagatacattgaatttgcagtgattcagatgacaagagagagacggggaagagatatgaaatttgagagttgtcagccatggttgttcaagttatcagttcaacaaggcaaagagctgggcaaaggcacaggtaataaggggacaatcattagtggatgggaagatttcaatgctgtccatatttgatgtgaggtatgtggggagagaatcatcaacctgggcactggggagatggcacagtgggtgaagtgcttgccctataagcatgaagacctatgtgaagccagatacaacagaacacatctgtaatcccagggctccgacagtgagctgagaggctgggacaggagaaatctggaagtccatgagctagctagccttggttatacaagtagttaacaataagagaccctgactcaaacaaaataaaggtgaagacagacaccaatgctatcttctgacctccacacatgtgttgtgttgccttcatccacactcacacacatgaacataaacacacaaacacacattgtgtacatacattttacatagagctttttaaaaagttgaaaaatagtaaaggcaaaccaaagagaataatattttttctcctgaaacaaaaacttaaatttggactcactttttcacacaatggtatgagttcatcctcaaaaaggtcccggggaagttttccaataaaaatttcgcagcctctttctgggggtgcagcatcccagcctggtggaggaccaccgtattttctttgtccattttcctgtgtgtccagggaagatgatggatgagggagagaggaaaacatcaaaatctttagtttgttttccttatttttaaaaaatcattttagttaaggtctatttgaggaactatgtcattgtcaagtaatagtagttgacatgcagaagataagaattaaagacttgtctatgtctatatgaatcttaacccttctctgcctcaaaggcttgctcaagataaacatgattgacacttgtaaaatgctgaacaatacaagaagttattcaatgtctttacacaatttctcatcaggtacaatgttttagagtgagagtatgtaccttaatacagaaaagtgatccaaaacccacttcaggtctagacaaagaaatgaagtctggctttatgtcttgtcttttgttttaagtgattatttttgtcgtttcatcttactgtagtaaaatacctaactcagtcccagtttcttaatgattaagtaggttgtccagttgtataaatgtcccaaaggcatgccattttgtgatctgacagtcactgagatctgggctctgatttaactttatggttgtgtgtagtggcagcacacttagaactggagtgtactgactccattctttactcactagctgtgggactttaggcaaataacttttctcatgtgcaaagtaggtgtaatagcagtctttgcccagagggtaacctgcatcaaataggcaaggttggtcccttagcctataattaatactcagttgttattgattcttttcttccatctttcataagccaaacaatatagagaccatctaaatagaaagacatgaagattaacacttggagatgttcaattgctgctgaaggatttaagtctgtttctaaagatgacagcatggtaagatgtttcctaatgcctttttatggggtggggcaatgatgttctcacttcaaagaacactgacttctgtatttctctcagacataataaatgttgtttttggagaggaatgacactggcattttccttcggtgccaactatctgttttccaagggtttaaagaccaaagtgtgggcacagtctgaggcggctggtctgctgaagttgatttgttggaggaagataaacaagccacaatgcacttcagcatggttagaatgccagttttattgtgactattaaaggtctcaaatgatgacatttattacaaaagtcaccattaatacattaggtagttttgtgccaggatgcatagggttgtgtagcaatcataatatacagaacagaaagaaaaaaaatgctccagtgtatcactcccaccatccttaaaagtaattactggcagaaagtgccttcccaaatgtgttctgtgtatacttttgaaaggtatgttttagtttaaaaacatcatttttcgagatggctgcttattgtttaaaaaagtgaagcagcttgtaacattacttttaggctctatctataccaacttcagttttcagttatttttattaaaaaatgatttatttttttatgtgatgagcaatgccattttgcctgcatgaatgtctgtataagggtgtcagatatcctggaatgggagttataaacagttgtgatgccatggggatgctgggaattgaagtcaggtctgttggaagagcagtcagtgctcttaaccttgtagccatctctccagccctcgttttcaatgattttgtcagagtttgctctaacacctttttttttttaaatcacagttttattttaatttaaattttaaaaaatgtctgtggtcagattcacctttttattttgagttaatttatatgattttgttttaaataatacaacaaaaggatgtattgccctggttactttttgcttcaagccattgggtatatttcatcttactaaatctttagagtttctcctatagaatgcttgtaatttcttaccctatattcttaaagagttatcaagcagcaaaactttgacatcaccaacaaacctgagaaatgacatattttatcttagtaaaacaacaacaacaacacccttcaccccacccccacccctgccaagaaagtggtatctgtacctcaactgagagtgttctaaacatgtcaatttgacatctgttcaaagttttcttttctggttttctagataatacctggatatcagcttccgaatgtcatatagcattctagcctcaaagcagtgtcatggcacaggagctattgctgtccccattttgcaaaagacacaaggttccagagtaatttgctgaggtcataaggtcattatgcagagaagccagggtttgaacacaggaagtcagcctgaattcatcggcttaatacctacatattacagccttgatgctggagggcctagggacttacaaacaacacagacgttaaactcaacctaagaaaatgtctgttctgccattaattagaaagtgctctgcctcacttaaaactctttccaactcccagtcattcagttacacattttgggaagaatatatgaatgtataaattccctctgtataaaattccctccctgagccaaatgtcaccatttgggtgatggctatccctcctatattctttcttgtacatttcagatatttatatacctaactaattgttagattacacagcataaatttgtacaatatgtttaccccttagattgagggaattgaactcatattccatagtggcaaagtggctcttctagaatctttgattacatgagtttcctttgaattgaaaataaacaagcaatgagcagagtgacccttttaaggctcatttatattgtcttcattgctgtagttgctgaaaataataatgtatatgggtatgagagctccatttgcttatgtgctttagaagcttattaattgtatttttatggtttctataaacacatgaaagaaaatacccagtaatagttttgggcattgcagagtccaaccagtctagagatgccctgaagttcaagcaatggggaacatttgccctgggaaccacccactaggcttggaatgcaccagcagaagtccagagcaatttgaggcaggcgctgggcattagtcacagggtcagaatagcttccatcactctgcaaggacagtggactggtatttcaggccctatttttatagctcaggagtttaaaataggtaaagccagactaaatctgtgcctttctcttctggatgatgtcttcagggcctcattctcctcagcaacacaaacatattaatagtttagaaaaagactagaaatactttcttagaattttttttttttttaatatgagaggatgtttatcaaactctgggaacttttacctttctttacaggcagcttctcaaacccctttctgtttttgcacccacataaataggtagaaaactttaaactgtctaattaaaaactgaagacccagtcctagctatgaatcctgtttcttttttaggtattgcatgctgaggctgcctagtaacttagcctatgtcaagagtgtttagaattccctcctccacagatatttcaagttcttcatgatgaaattgtggctaccatcttcttgaccttgaatagaaccagattacagtttgataggtcattctgagaaataaatcttagaattaatgctacaaacaaattgtttattttgtccatcatgcttcagaacctattaccttctgaaggcgtcaaagatgtcagctatttgcttttccagctttctttgcagcttgggtgactgtggttcttagtagtaataaaactgaattctggtacaaaatttgtaaaagttcaaacttgagtattgagcacttggtggtggtaggtaaaatttttctcatcgttataaatctgtgatgttattttgggtttcattcacacaaattttcccttaacctggttctcaaaatccaaactttcatcagcatctgggcatggaaccttgtgaaatttaaatacgtgtacatatgagcaatgcatgatatatgtaatatatgcatatataatatataataatggatatatatttgcaattataacatgttgagttcatttagagttgcttgtatgcatggatgtagcaataataaagaaggaaagatcatgaatttgagagggagttgggagtatggacatgggagaatttggagggaaagaggaaagggtagcaatgatgttaatacagtactcagttatgaaattctcaaaaaatttaaatgaaaaacatccaaatttttaaagacataatacccttcttaacatcagattttctgtttgactagccagaattgactcctgttatttacacataaaagaaacgacaacaaaacaacagttcgatatcattgagccaggcattatgtacgtctacgaatgcattaactcatacagtcttcctcatgtgtgaatgaggtaccccagacacagagtgcacctaaactcatgcgcatagtattcatggcagagacacaagtgaaatctaagaccacgcttttagtcatggcattgttctccatggttcatgatttatgagcccatattctcattttatggggaaaaaacacaggaatgctgtgttctgcccacctgtagttctagatatgcatcttgacgtattgctccaatatctaggtgcctgttgtattttagatataaacaggtgaggaacttggcagacacagtcatatgttctgggcttttaccatctgtaatttaactggtagcctctgcatgtaaactgcagatagtgacttccatgtggggttgtgtcaataaccatggagtactgaaagatttcgtgtcaacaaaaagtttctcaatgcccaaggaccaaaaaaatgaattcaaaatcaaatgcacgatgagtccctgtttctgggagggctctcctgttgctgcatcctgaaactttgctgcagccttgtttgtaaacacaaggcatctgcgctgcccattgtgccactgagcgctacccaatacacctgcactcaggttcaacactatcatatcttacaaattacagtgttttttacttacacacaaaagtttctcatttggcagaaacataatggtttaattatgggaaatgacaatatttccttaccctcatccctcagcatgtgagcattaagttagtatatctttggattttattatgttagaatgcttgatttttaaaattttctgtctgagttactgacttgccaggtttcacaaaataatcattagatggattttgacttgattttgggacacagtttccagacatttttgaaatggcctgacctctgctattttgtactgtgtgtgtttatgatgcggcattctcagaatgggtgattacaaaatcaaaatatcaatcacttctcaaaaccattaatgatgctctgtgtcttgcagaaccaaaatttcagccaagatttaattattgatgcaatgcaagcacatcatctcagagatagcatttgctttcatttttgacccatgataaagttatatatcaaaggatactttctgaaataaatagcacttaggaaactcttgaaattgtttaaaagcaaagtccaaagttaaaaacccctgtctgtgtctctgaatgtttgggtcatgaagttcatactaatttttaagttgatgaaatagagcacctctgtgcttctagtctgagggatagcaccacaatgcctcgcttgtgcccatgctgatccttctgctgaagatctcttgtgctgagtttctattaggggatttaagtaccgattcattgttatttgaaaacagcggcaggatcacatgcctttcctgggatgatggagttcccacagatgttggacccactcacaaagtggctcacagaactgtcccttcatttggaggcttccacactgcaccaacatctctatctagaagaagcaagtctcctttgagctttaaaataaaattggcctgtgagtggctgcagagacaagtgggaggaagctcctgtcttcaagaatttgacttgttcaactatatgttcatacaactgacgcagatggtctaagtccttggataacccaggaaggaaggggtgaccagaacacacaacagaagagaaaggaccaagaagctatgttttatcaggaagtccagtttctatgtcttgagtctatgtttatgtgcagtgatggaaaagactaagtcaatgctgctctggtttttctgcctgcctttttctgagccagtgtaggtgaaagaaactagtcacctctgtgattctcacgttgatctggactctatcattatttgatgacctttgtcttcttttatagtttctgatttcacatgtgtgttatcaggtgtctgtgcaacttcttacatcttcctgagccatgtgcgtggacatcctcctattgttttacttcagttcgtatataccctttaggtgacatgaatctctgcaatcagcataatgttaggtcttgtgttttttcatctagactgaaaactcagtttatttatatctaggttaattattgattttaaaagacttattacctccatttagttgctttgtaaattacttattcattccttttttactttctctcttttggttaagcagtgtgtctctggtagagtattttcatttctttatttttaaatgtatctgtaatgagggatttttttttctgtttttgttttttgagacaggttttctctgtgaagccctggctgtcctggaactcactttgtagaccaggctggccttgaactcagagatctgcctcctctatctcccacatgctgtgtaatgagagctttaaaaaagattaattttaattttatgtgtacttctcaaataccctgtgtatatgggttttttattgtatgaacgttggtgtaacatatgtgtgtgtggcacccacagaggccagaaatgggcattggatgttctggaactggaggtacagatgattgttaaccaccatttgggtgctggcaatcaaactccagtgtttttaagcactgggtcatcatcacccagcttcctgcaatgagtttttactttgtgattatcaagaggctcatagaaaaaactctatagatttaacattatttttaaccaataactgtgctcacatttttaaaaggaaattgttgacgttactatttataccttggtgttacatatttctcattgcgaatattactattattactgtcagtaggaccatcactatttttgtagaggtagaggtgaattaatctcctagaatcttgtgcattggcctgggtgtttaccagtgaggttttttgtttgtttgttttgttttataccatcggtagttttcctatcactcttcagtatctttttgtcctcaggatctcccattaacacttcttctaagagaagcttgatgatgacgacttctgtctgcttctctttgggacactcttgacacctctgtctcaaggctgcttgtactggacacagcattcttggctagcagtttattccttcagaactttgactatattactctctcccagcttgtaaggtttctgattttaagtacaaccgactctcttgtgtctcaagtactgctcttctggtggcggtctttcaggatcacctttatcccatacacacacacacacacacacacacacacacacacacacacacacgtacatgcacacatatatatatatatatgtatatgtaaaaatatatgtatatatatcataaaagcgtataattccacagaaaccctcttaatcagtcaacatgtgacgtttaaggctaagaagtaaagatgcatgcccggttaaagggaagtgagagacgaattaacatcgttttaaatgtggcattctttgaagcaaatgtcttcactccccaaaggtgttacacatttgacacataatttggttgagatgttgttccctctgccagcggtgttggtatcttcatggctgtttgagaggtttgcttgctcccatgtcctaacagtgacatcttgtctgaagaagggcaccggcttccatcatgcaacctggtttatgattcaaatccaaggcactgatatctttgattgttgctgcttttttgcttgttttctgttttccaatgagaataatcttcacaaaggtagaaactacagtcctctttgtggagtcaatcaatatatcaatatgagcaggacaaaggctaggtgcttgaattagcatgaatgagggaaatggagaaggttgcatctacttcccaggacaaagggctgactggcttatctatttaacataccaaagcagacctggctgccaggttctcccagaatccctcagtccctacctgttacaggatgtgactggcatatctgcccccacctaatcttctctagtcccggaagcaagtgggctgggggctgcccttctctcagtggctcttccctataaaatccacccatttttggctatgccagtctttttaccctttttctctcttggcctcttggcccaggcaactcctgttttgtcagtgattcctctcttgctttcccttcccgtctctcctttcatggtctggtttagtctgccacctggactcttccatctgcctgctctctatcttatctctacaacaaagatctccatactttaggagtagtcatattcttctcctttttatttcttctccttctcctcattttaggcttttaaacaaaatatcacatttgaaatgtgagaaccgtttgcatacaacattgaatttggatacagactacagccacacttgactgatggatcattgtttaccaatctgtggtatgtaatcccagggcagtccaactatgaagagaaggtctatactctatcagtatgaaacaaatattaaacaaagatttgcccagtgattccgggtacccaccatcaagatgagatagtgaaattctctctatgaaaattgtcgaattttcctaattgagtatttattatagtttttttttctactttaggatactttcccccctcaaataatccacagtcagtgtggaaagattgcaaaataaagaaaatatcaggcatgaaaaagtatacttaataaaagacaatattttattttccagttttaaattcatgtatagataatttcttaaaacatgttttttgcctttgactctcctcaaaacaacatttgttggctttggaaatctaggaaatttaactaggagtagaaaaatagaaggaaaaaaaaaacctcaaataacctcaccacccagaggcaaaggctgtttgcactgtaacacaatttccaaatatttctacatcaggtagtgctgctatggagcttaaagtttaacttgttagccttatataatttttaaaaatagcaattatttaaatctttctgttttaaggatgtgcattgagtttcttagtctccagagaactttgatgaagtgttcaggcacaaatatccaagaatattcagttatataaaaagagatgttacaacttatgctcttaatcctcagaagcacacattgttgcatcagttgccatattaagggttagcttatgttattaagtaacttgtaaaattctatttttgataactgtgtttgtcctgctggtgataagagaacacaaacccgtcacctctgtgttttgaatttgataccacactggaaagacacagaaaagcaagtccttcaagtcagaagttaaccaaaatcttcatttttgtccagagatttaaaacaaacaacaacaacaacaacaacaacaaaaactgattctgtcttctgtcccttttggtatcagttattcctttatgttgaagtattaggacgacgaaagagattttcctaaaacatagagcctgaggttttatcttgatacacaggtctagtcttcacctaaggtggccatgagcacactcagatgatactgattacaaaatcaaggctaagagtgcaaggagaaattaaggtctccagcaattaggaaaattgttcatgattgtacacttcacacttgataaggagtaggtgagtttataggccttctgattgtgttatttccacattttgcagcccaaatcaagagagatttccaattcaagattatttattatgcatatattttaaaacacattaaagtatatattatatatgcacacatatttttattacatttattggaacacttaggtctaagcaactagttttttggaatgctaggcttccatgttattggagaacttcagaaccaataatcattctgctatcaaatatacttaggtagtgctgcaaagtttaggtacccacaatatagtttttgaatgcctagatatatttatttctaaaatgactatcatggcttaccttccatcgtctcaagaggtggctgctatttaaatgaaggaagcctgggtcaagaaaagtccttggggagtgggtgtggggtgggttgggggcatgagtggggacctgggaggatgggagggagagcaaacggggattggtatgtaaattttatagtgtaaaattaataaacttatatataaaaagaaaggaacttgtgggcagaggagggtcctaagtcagtgaaattgggctgtgtctgtgatcttacagtgggtcactacagcttcaagtcctcagatccttgtgccggaactggtaaagcataaatctcttcctactctcttttgcttcatccatcctgcagcttcaaggccaagtgagaacttgcagttaaagagcaaggaatagatcaggaaatagaaaagaaattctttcccactctgatgtgtttaggacagggccagaatgttgaccctacataattacatttgactgaaatctcagcattttcacaagaaagctcttattaccttaatattactaaaatatcatgaggcttaccctaccctatgtgtgtgtgtgtgggtggggggctgcatagagtaaagctgaatagcagtgtatgatgtaggagtttccccttaaattttgcttattgaagaaagtggctatgcagtcataatttatttaagcatctccttactttcatctacttaggtttgtgatagcaaggtattctatggtgtttttgacagatttttacgtacttctatcatgttctatatcaccaaagaggtggactaaccataagtgcctaaagattgactaataggttttaaaagtgtttgaatgctttcccagtgctgcaattataaaaatgaagaaaaaaattgtttaaaaaagaaagaccatctttatagctaactgtacttgaagacatgtgaaagacaaattacattaaatatatttgttttatagactaaattctttagaattatcagtgattgtttgagtgttgtggaaagataacatagatatttaaattatccattcattttagagataaaaacatttatagttcattgattttaaaatagctcagcttttggtaagtactataacatatagttcagtgtttcccttgacttaatgaaactttaaaaagtcaactatggaataacaaaaacccatgaaatatttaaaaagtctgacaagcactctttattgggatgaaaaatataaatacttgaggcattgtatcgtgcataacaatgcatttatgatttatagtatgagaataagtaaacctagggcatttccaacaatataacaatatgatagctaataaaaggcaggattggcatattttattactacttagatgtaccatttgtattgataatggtaggtagatttgagttcattggaaaagtatgttggtgaaaaactaatagttggtgaattcacaatgtcttactacaaaaggggtattgtgtattctaatggaatatttttttatgtatctaataccagcctgctctttaatgtagcatatattccataagagaagttatcgcaatgacaataatcatatgtaaataactcctaacaactagcctttttgtggcccccgttttcttttgtttttttcaaaaggaccaacatggacagaagtgattgttatatgtcctagagtgggcaagctgtaatagctaggctgacaaaatgttaccttcttggaagccacatcttggagtcttccttcatcttcagggacctttgttttctaccaattcctgtaacattagctaagctcatcctcactaagaactgggggttctagttgccttttcatattgtaaaatatactttcaactgtaatagtctctattactatggataatggttctattttcaagcaacaagttacggttgagtgtataatccaggggagaaggaacttcatctacaaggtcgccttcagagctgaaaagaaagctctgtgagatgtatacaggggcttctggaattctatatcaagggacactagtgtttccaggactctgaattcagtgttgagtctcagcagacatcacaagaagttcctacctggaccaagctatatcctgtgcgctggaccagtgcgcggagggctgcttccttctgggtgccgctcaatccatccccggatttgtgatttgattccattgacagtgattatcagcaaaaaatcaggttaattagggttgctcactgaaaccaaatttaagataaattaagtatattgctatagccaagtccacaattgcccatcatgtgccgggcatttttaggataggcctataaatgactcattaaggttatagctgctaagagcttcattcaaacaagccttgccaaacatatttaaaattatgcttttataattatatataattttaaaatgtgaaacctttagaaacaaaaactgaagagtacccattctctaaagcatatccacccattctcagttcaattaccttaagatgtcactaaatatacaaacaaattagctcatgtcaattaaaaggatgtgaagagatggcttagcagtaagactacttggggctcagacatgaaaacctaagttcaagttccctgatcatgtacaaagtttgtaaccctagcaccatggtggcatctctggagcttgcttgccaccagcctagctctgggctcagcaaaagaccctgtttcaagaaaatgaggtggagagtgatggagcagggtgcctgatgtcttcctctggccttaagtgtgtacttgcacatcatacacccatgcatataacacacacacacacacacacacacacacacacagagaggaagggagggagggaggaagaaagaatatgaacgatatgtacagatttgggaagaagaggctgtcactactagcatacttgattaagtatgctaaggtagaaaatcaaaattctgaggttgagcttcattcatctatttcagatgacatatgtatttccagagtcttttattttgcctatttattttacaaacaaaactggataaaggattttaaaatcatatgtacacacacacacacacacacacacacacacacacacacacactcacatgtttacatatataaagatttaggacaaaggtttcagtatttacagtttacaaaagcattattttttaagaattcaattaagtgtgtgtgtgtgtgtgtgtgtgtgtgtgtacacgtacgtacatacacaaagcacacacagaggtcagaggaaaacttgtagaagtcagttctctccttccaccatctgggtcctccggattgaactcaggaagttagacttggcaacaagtgcctttacctattgaaacatctacccaaaggttctgcccttgtttttaatcttgattttctatcttggttaggaaattttacaccatatgttggtcttttacaccatagttgtgatttgagactatgtgacaattcaggttaggtcatatggctgtactaccacagttagaatacatagctttctatggatattaaaacataggtgaaactgttggtggatacagttgtagaaattgctatgaggtaatcttaaacataaataaaactataaaaactattttgaagatttataaagaaactattacaagagttacattttgtctaattttagtttcttggtaaaagttactaaatttgctaaatgtcactaaggttgctatttaattaggaagctctcagatcctcccactgtgccttgcttatcttggaggaccaggaaggacatggaggatctgataaagttatttctatttgtcttaatagctttgaaggcaaagtctacagtctattggctaagttgtagtttttccttttctaaacttcatcatttctatcaaaaaggtaatagttcatgattacatgatgacttcactttttttctttgaaacctaccttgagtttgggttaataattactaaaggttattaaaggaattttgacatcacaaaaatctctcagtccattggagtttactatgaagttctgagaagtcctttataatgtctaaatctcaaatcactggctatcagtacatccgaatgaaagtcacaatttgcaactaaaggcactttatggattgggtatatatttagttgcacagtacttgattaatatgtttgaaatcctaggtttaaacaccagaactcccaaacaaaacccaacccaacccaacccaacccaaaacaaaacaaaacaaaaagaaagataaaagaagaatttttttgagttgaggaagttaccccacagtcaccctgggtgtaatgagaataacattctgacacagctttgtaaaagctttgtgccaactagagtatgactaggcacagaatcatagcatctgtcagagagggcaggagaggcaacgcaatcgctaagcacctctattctcaactctcaggttttgttatgaaaacttacatggttttgtggaatagtgctgttactcagttcggataaagagaagagtgagataagaatagaagttgacaaaagagcgtcacaggtagcgttatggggaagagtcagatatttacatgcctccttggagcatcgggcttttcatttgtgaattgtggtaaggagtaggctgtgaacaagtggctgtggtgaagatgaatgagaaaatacttctgatgtgttttgtttaggtcaagcatatgtgattcaatgtgatttaatattcctgctaataaatcataattgaggacagctgggagatggaggggcaacagagtaattccagaaagccctgccctagtttactttctgttgctgtgataaacaccatgaccaaaagtgacttaggagaggaaaaggatttatttcaacttactcgttgcagtctattgtttagggcggtgcttctctaccatcccaatgccttgaccctttaatacatgttcctcatgttgtggtgatcccaaccataaaattattttgttgctacttcataactgtaattttgctactgttatgaattgtaatgtaactatttgacatgcaggatgtctagtatgtggctcccaacgggatcagaacccacaggctgagcatcacttatttcgggagttcaggtcaggcacttaagcagaaactatggaagagttaggtttcctgtttagctagcttgttcactgaatcctgctgggctatctttttttatacagtgcagacccacctgcttagggatagtagactggcccagcttatatcaattaggaatcaagaaagtgcctcacacacatgcccacaggacaatctggtggacactcttcttcaaattaggttcccttttcccaggtatctagacggtgacaagtttcaataaaaactaacgggatagattccctggaaaatcttcctttgacaaatatagtgaagggaggcaaagatataaaatgtcaagggtcttcgcttgcactacccagctaccatttaaccatctctgatcaatgtctccacattccctatatttttcttaacagtggaactgttaactcaaatgtatattgcctactgaattaactatataaaaatgggctccctgacctgagtgtggtaatcatatctgtaatacaagcctataggtcaaggggctgcagcaatgagttccaggctagcttgggccatgtaaggagaccccatgttaaaagaaatagaaggcattctcccctttacacttctgcttccatgccaggagaagccctttgagcctcaacgtctatgtataaaattaggatagtagtatttattatttcatagttcttccggggattaaacattaaaataaatatcaaatggtctctggcatttaatacccacacaatgctagctattatatctctacatatagatgagtatgtgtgtacatgcataccatgtggtacgtcatcagcatgacacaccagcatgttcctttagatttccaggctcactgcttacttctttactttcacaagtcttccaactccactgaccctgtgactctgtctagatttggttgaaatccatttgctctgtgctgtcttctttgacaacctccctgggtaacattaggagctctctcccccggtgctctcaggaaagcctgtacagccctgtattgccacacacagtgctgaaatgttccctcaactatcctgttcactgaattctaagcttgctaaatgaaagggctatcttgtacttctagcttgccccaaagacttgatgttatgccaagtgttcaatagacatttagggaataaacagaagacttgggatgaacaattttatagattatagtgacttgtgctcaatcagaaataaaatgaacatatacatcaaacatcctagtacttattagttctcattattttgagtaactttttatagttctaccttagaataaactagttttatgagagaagttgattttgatggtttctgtacatgttgtatttatgacagatgagaataaatatttctcaagggcaaagtaactaaaactggacatgttttgtcctctaagaatttattgttttacatctgccatatccatttctattggacctagcagtacctagaaattgtggtttaagatttctgcttccctcaatgttgagggaggtttggaataggcctcatatcacctagctggattgcttaatacagttcatccagagttcactgctgggaggggtcagagctacaggctggccacaaggtctctgatgtcagtgggacttgggtcagagaaggtggaaggagggaggagaaagagaaggaaaggtatggagaaactgatgactttcccaaatttttgccttttgggtagcaatacatgctattatgcagtcataaccctcacccattacagaaagaagaaatttatttgataataaaattttggtgccacaaagattagcaagttacaaaggaaaatcaagacaggcttgaaagtgtggattgttccttggattttattgtcctggtggaacctacagtggagaccagggagacagaaggaataggggagcagcctttacttttctttctgaagccagtctagacatgagacaaaagctggaaaagtacatgagaaggaagcatgtttaagagcaaagaagcaagagcttggaaaatgaaagcagaaattataagcagaggacagaaagggggggacagtagatgtctgtgggtgtctttattaaaagttaaaatgaaagcattattctcatcttttatgaagaggcccacaagtattggcttcctctatgcagtcctgcctttggcaatttagaattagaaagtgtggttctgttgctatagttactgtgtcatccacttatttgatgctttggaagaggctggatgaggcaactgaacggggagaaagacaatttatgacctggtcagtagtggcgaggggtcgttctcactgagtaggaacttcagggctgtggtgacaccataccccatgtgcatttgaagttggggaaggtttcacttgctgtttagatgtctctaagctgtccccatctttctctaatattctcttgtgacccggtcttgcatgctataactgagacatacatagcccttatgaaacatgcacaaatggttttagcaagaaatttagccttttaaagtaccgcctgagaatatcacagagttccagactgtacagaaacaaagggtttgtgataaagtccatgcacactcttgatgatgcaaagtaaatattaccttgcattgttcaataaaagaagtataaattagttccaaaattcaacctagaaaaacgtttacaaatgaaagcaacagttcatttgagtatacatcatgaaccacagaaaaactaatagagaatatacatatacacatatttatatatgcatacaaaaggttgcagcagtgattatgcagattaaagaaatagaggccatgcatttggaaagagattgtagggaggaaaaggaaagggaaaataatataattatattttaacttagaaaactcaaaagcactttaaaagtctttatgtcaccttattatttgcaaaaatttatcagtgacttcatctgaaccatctccctattattaagacatcagttaatgtatgatgctttagtttgtgcctagataatctcaaaataaagaaattaaagttgttttagggatcatattaattgcacttgtaatgaacaaaaccctctcagaagtgaattccatattgtttgagaagaacacaatgacattttgatttctgttcttcctccatgattttaactttctgaatccaagttttcttttttaaaaatatggtgtaagatcattgatacttaattggaaggtataaaaaacatagtgactgcaacaacaaaatgattgaacagatagggtaatggatgtgagaccctgtcatacagctggcatttgacagataacatctgatagtccttttctattcctcagatagtgctttcattgactcagctacattttgtgaatttctcattggttagtgtccttgccagtcattgtccaatgtgggagagatgtagttttgaatgtgtaatgctgagttcctccaaattgcttcaactattagtacattgtgctttttttgtttacagaaagtctgtaaccatattaatatggttttcacattgcccaaatacccagtgatgaagagatatttgaatgaaccgtggtacagatcaggttgatagtctagaaaaaagagtcacaattgaggtagattttcaaagaaatataattgaaagctaggtcataaacacaggtgtctgatcaaatttcatttatgttaaaagtatatttctaaaaggctaactggctaaactgggtgatagggaaatggtttattttattgtattcattcctgcttatttggctgtttttacctttctgtgaggtatggcatctaaaatctaaaatataaaaaattcaaagtttttagtatatgaatacttggggaaatggaattttcattataaaattgggtcaaaattttaatctgaaaaatttgcttaaaacaaaattactgcaaataaacaaccaagggaagaagctaggaaaaatcataatggactaatagataaaatagaattaataaagcaaaattctacagacttgacactagggtaaaagattatggaaaagatgagtctccaggaatgctgctgatcatccaggtaaagagaagtgaattcttgcaacaacaggaaagtctataggcacaagctagaggcttctcaataatgagaatatatgttctagtaatttgaaagatatagatacaatgggcatttacttagcaaagtatgatttcctttacaaacttgttctaaggataaattaaagttttagataaactaataaccattaacttacagtgaaaaacattcaaggctttttgcaaagaacaccagaacaccagatagttttattaggcatactttatgcattattaatgaaatggggcctgaagagatggctcagtgtttgagagtgtttactcctcttgcagaggacgacagttcagttcccaacacccctgtcaggatgttcacagctccagagggatctgatgtcctcctctgggtttacacacacctcacaacacggacacacacacacacatacacacacacacacacacacacacacacacacacacacacacacacacacactaaagaaaaagagaaagaaataatcatatattagaggaagccatttgaaaagtagaaatttgtgaagttacctgtggacatactacagctctgacataaaccatacaactgtataataaaacagaaaactagtagaaaaaagatagcatgtgagtgtaaatgtgagctgacagcacatcactgagattagaacaagacagcatcattataaaaacacaaagattgctgaacattagggattactctaagagagacatacatggtcccctgttgaaggggaaaggacaagatctcctgatcaaattgggagcatgggggggggggaggagaaggagctagaagaatgagaaggggagaagaggagggttaaggaggacataagagagcaggaagtgtgtgtagggggaagaatagaggagagaaaataagagataccatcagagagggagccagtatagttttaaagagaaatcaggcactagggaaatgtctggagatctacaaggatgacaccagtggagaggctaccttaaatgccctcccctgctaatgagattgattattaacttatatgccatcctagacccttcatccagcagctgatggaagtagaagcagacagccagagctaaacactgatctgaactggaatccagttgcagaggaggaggagtgatgagcaaaggggtcaagaccaggctggtaaaacccacagaaacaactgacctgaacaaggggaagctcatgatccccagactgatcactgggaaaccagcatggaactgatccagacccggtgaatgtaggtgtcagtgtggaggcctcggaaatctatggggtctcttgtagtagatcagtacttactcctagcatagaaatggactttgggagcccatttcacgtagagggatactccctcagcctagacacacgcaggagggcctaggccctatcccaaaggatatgacagactcttgaagaccccctatggaaggccccgctctccctggggaccagaaagggtatgggataagtagggtgttcgtggggggggggcaggggaggaggggagggagagggaacggggtttgacatgtaaaacaatcttgtttctaatttaaataaaaatggagaaaaaatgaatctaattctcttcactaatgaaaacatacatgtactagtggtactgaggaaaatgatatctacattcattttaaagtgatgaagcttttcctttgagtgaggagtagagccccaaatccttgcattggaaaagacacagcaaatgtgtcactttagaacagtgcagagcaagtacattggttctatgaaactgtattgcatctactcaaagcacactgcaaagcaaagtgaacatgttttctaagaacacaaacaagatgcaaggataaaaactgaccaataaagggaaataagaagaataagcataaggagaaatgcctgaaatcatatgaaaaatgataaaaatccaacagaaagccctaaagacttttagacaagtaaaaagtttattattcaatgaaatctgttcttcctaaattttaaactattgttactccaatttagattttattatttttacaatttgagaactcaattccataattatggcagtaagaaacacacagtgaatgaatgtcacatggaatgatctggaaccagtctagccaacagtaagaaatcaaacaatcccaagaataggaaatcaatggcacagaatcgaaagccttgagtcatagttttgtttagattggtatttgctaataggtgttatttcagatcacagggagattgtggatgatttgagaaagagataaagttggactatcacctcataacctatgcccaagttctaggaggactaaagagataacctttaaagacattacataactactagaagaacacacagaacattctactcttatgccacaaaaggtcttttaaagtaaatgtaaaaatctgcaacaaaaggactggcagatttaactacataaaaatcaaaggtgcatgtaattgcaatgtaatctcagcaaagactagaataaaatgattgtaatataaatagtagacacaaatgatatttgtaaaatgccaagaatactttttgttggttttttgagacaagaatacttttaaatcattaacagagagacttacaaatgagcggacagatgaacaaaggacacaatgggtcaaaaggaataaagacaacttaaaaacttgtaatttacacatgataatccttttttgcttgtttttcaagacagggtttcactgggtagccctgcctgtcctggaactcatagagattcacctccttctgcctcctgaattctgggattaaaactgcctgccaccactccccagatttacacatgataatctttagtgagcaagttaaaacattacattacttctttacgtgacaaacctttaaatgataactaagaataataaacaaatctgacacgtactaaacatatcttacatgccatgtttcatgtttaaacatgttttacttgttcccctaagagctctatgaagtgggtattaatgtttcaatgattagcatagaaaggataagcccaggaggagaaaagttagttgatgtgcccaagatgccccgggtgacgagtaacagacaaaccatctaactctagaagtctgcaggctcagagtatgtgcctttaattactgaattttttcccaattgtccttttctttttctgcataaaagaagtgggtgagggttgaagaggtcataaagtctaccttgcttccatcagagtgttgctatgaagaatacaggatatgaagaaaggcagaaagggctatactgtgagtctgccctctcctccaccgggacacatgggcttgttcagctagaacattatgtaatttgatcgggatggaaaatatgctgttgtgttaattcctttgattaggccacagtagattgtgtgatggtgcacatggaccaaccttcctgcctttgcaaatggcccactgtgaacacgtgcccatttccagccctctgttaaacactggccatttctcattcagattctaggagactttcatggcttaccctggggtatgtcatttggcagaatgtaatatggctttgcatttatttttattcttcaatttgaattaaagcattagtttccttccatggctcctgagctcatttagactatagaaaatcagatagaaggaagtcaactaggggcccaatccctgatgcagtagtacaatgttgggtcaccacaaccaggggacctttgcgcaacaccagacatgaatgctttgagagtgggtgtttcctcgactgtcagttgtactcgtaactcttttttcctcaccctgcctcttgctcttgttcttgctccagctccttagctgattctcacagctaagaagttagttattccatctatttttttgttttattttatttttggggagcagtgctgagggacaaaagtttctaaggaaacttactttttttgcagccatgtcttggggccattaatacttcgcctattgcttgctaatgaatgcttacgatccatataccatctaatttggaatcatttggagtcttacctggagtaacttgaactaactaaaccaacatagtgaggaattagcgtagtaataaaatatctacagagaaagataactatgtggggtaaccactggagctattgacttagaggttattggaggaaagtaatgagcagatatttcatcaacatgatattttgtatatattttgcatatgaacaagtgtgtgaatgaatatatttgttctaaatcaaggctttaattttctaacttttatttacatgtttttttactgtgtcaaaatagggaataaggaaaaatctaattccaaaactcttgagaaaaattaaacataactatctgggcaattgattgtcatttttgcaaagcaatcctgatacagtagacttttctttgtttgaggataagtaagccttaggtattaagattaatcaacttttatttaaaaatctgtttaaaattgtatcatctgtggttcaatagaaacacttcttaaatcatcatctcattaaacaggtattatagagacaggctttatctgcttcaaagacatctcaccgcttatctgtttgaaacttcctttagctatcagagagaagccctttaaatccctgggatttaactcaaaactaaattatacaaggaaagacaagaagaggaagcattaacttctgtacatctcaaaacaggactttgagatttagctgtgttcttaaaggttagcaagtgccattcacaaggctgaacctcagcctcctccaaattcatcttaccctcagaaacatcatcaccttactcatctgctcaaacagtgaccatgcctagcctgagtgaattctttaactgtgacttccattactttctttaagactttatcctcgtactattaatccatctggtgcattctggtcactggagtgtaaccacaacagaaccagctgacaacacttaggagatagtggggaccttcgaataaagaacagactcctgtttagagttagctacactcaggtgttatcacgactcatggtgtgtgtgtgtgtgtgtgtgtgtgtgtgtgtgtgtgtgtgtgtgtgtgcatgcacatgcacacctaacaacgtactatatgtgtcagaatttaaaaaagaatggaatcattttcctgcttccatataggaagccactagtttaccatagttaataagcatacagtttttttttaggaaaatgagagacttcagaaaaaaggtcattatttaatctcagtttgtaaactctggaaacagtttcatatatatgttatatagtaatcccaacttcttcaagggtgagcctagaatcgagatctaacagagaagttgtcacccacctatcatttacaacagggatcagccttttgtttacaagaatggtcagctgctaattaatgtggagtaggaatggaatgaagattgctcgagactgtatttcagactattggaacaaggcaaacggctagaattcttgatggcagaatggcaccacattgccctacatagaaggaagcattttcctgatttcccttcgtggatattggtctattattcttgccgttcagttctgatgcttagccctcttccacacttggttttctcttctggaatatgtacttcatgaagtttctatgcttgtgctgggggctgctttgggggcgggatgatttatttaatgcctgaattattgtcagactatgactaataactacctgcttcaacaatcacctgaagttttataagaggctttggttgctgagtgtgttgatttttctggttgtaaccacgtagatagcaaagccttcaggatttgcactctggtgtaaagattcatctttctactttgcttgctttaatttattacccaggatccttcaagtctttctatgccccaaatccagaagtcctttcagtgggagagagcatttatcccttgggaaaactgccaccgaactgggagaggtggctacaagctcacatttgcaaactggggaagaggattctctaagtttatcagcctccttattccatcctaacaatgattctcaatgtttcatcctgtggcctgtctctcctagccattaaagcattgcattcttggcataaattgtggtaagagttatggctttaatatctaagtctggcttacacttgcttggtattgtcttacacagttcatatataatttttgttttcctttgcaaaacaatcttgattttagtagaagttaagtaattggcccaaagttagatgagtgggccaggatatgagtctaagcattctcagtctagaactttgttttaaaataatagtttcctctgaaatatcaactctatgcattggaattctgagataataaatgattattattattatagaacatattttattttatgtattatttcagaaaggcaaataacaatgagtttgtagacattatagttttttttgttttgttttgttgttttttttttttttggtttttcgagacagggtttctctgtgtagctttggagcctatcctggcactcactctggagaccaggctggccttgaactcacagtgatctgcctgcctctgcctcccaagtgctgggattaaaggcatgcgccaccaacgcctggcaacattataggtttttaaatttaatgtttatgggtatttttcctgcatgtatatttgtacaagccagaagaggatattggatcacctggaaccaatgtcacagatgattgtaagctgctggaaattgaacctgggtccttgagaaaaatagccagcgcttttaactgagctatttctctagtcccattatagggttttgaattttaattcagtgtgtgtgtgcgtgtgcatgtgtgcatgtgtgtatacaaggtgcacatttgttatggtttgggtgtggaatcagaggatgattatcaggagtctgttacatcctgccactttgcaggatatggacatcaaattcaagagatcagtctagcccacaaagtgctcttgccaggccttctatgcatttttttcccgctatggtttcttaaagggctatataatagcattctcagggtgactccagttcaggtcactgcacatgacacatgtgtttgttctaacgagagagtgagggacatactgggctcaatgtctggtatatgttatacacccttgacattaagaattatttactaagttaactcttcacacagacacttgcttcaagtccatcattccactctctcctccatgtcttctccactattcatctttccttttcctaattagcattcccacatagctttgtcagactcatttctgtttatggtttgtgtgctacaacccgcactctgcctcctaactaatttgtttcttcagaaaacatcaggcaggaaattcactcttttgctcaatgaattatactctatttgggtcaatggagctcatacttggaaacatttgagtttctgtgtaaactcccaaatgaatgtggtctcatctgggactccatgtgtggacatggggccatttattgtttctattgcaaaaaggacaggttctcctaggagagctacattatcttcttccaaacactaccagaatgtgtaacaattgcttcacatttacattttcagtgatggctctgtggctggttctgccactgtgttaacagtacctttctatacaccacacacacacacacacacacacacacacacacacacacacacttctgtgagtggaacctctttgtccctaagtcacaactgggcctcctttaactgagtctctgctatgaatctggtcatagagaggaaggtgagaacgtgaagagattaacactggaggtcctattagcctgtctcccagaatttgcagagagtaagtggaattagaagtaggtatagtgggtggtcatacaaagcaagggcacttttgaaggctagaattttgtactttgatcctcactgtttttaaaaagacgttttctattctcagggcattcacttagtttctctctgtcaagagatctcaaatttcttccccttccaagctgcaatacttttcagaatcacccatctgcccttggtttacaagctgacgcatgtggtgtggcttctttgtgtttctccatgtccctaagccttagtttcttgattggaaaaatgatatggtcatggtatctattttgcagagggattaaaactgctcaccgaagtgcctagcatgtgggaagagccatgggagaatgttattattaataccactattctcataattatagcttgccagttgtaattggttaggagtaactctctgcatcctcctgggaatgtgtgggtgggtggggcagctccagaaaagattaggttctaccaacacagttcattccctgtggcattggatttagatttccgacttccagaacaaataatcagaagcaatagggtttgagtacacctaataagcctctttgcttcatgctaaccgccccagccaagtgaataagtgctatgcagaagcccaataaaacagctagtgtggtgattactaacactactagaaacagaaaacaattacatttgtctgtaacgctttgcagtctcccaatagtctgctagaagattttatgattgtttgctcccgcatttcttccctgcattattccacagtactggaatggttcagtttgtttcaaggctgctttcttgtggaccctctttggaactgggctttcattcacactgatgtgttcttacgttattgtttcatttagcctcttaactggttgatagttgatgtctactagaacagctgaagaccgagaggtcagcactattctgcatgaacagattaagatctctatatcttgaatgcatagaatgataaatgcagactcagctgccttaaaccagaacataataaagcatgcatgaagaaatttgacaccaaactcatttaaattctgctatatgaaatatttttaaatgcttatttgttactgctgcttgcagatacagtaggatgctagcaacagtgtgagttactttgtaaggaattgctatttagggaatccctagaagtctgcactttcctttctttcatcttggttgtctaccagaactagatgataaaactctgttgctgatgacaccatacaccttgtttaagatgtagaaaaagcaagctggaactgaactagatgtttccactctgctggatagcttgaaggtaccaggaacagctatttagactacagggaagaaaacacattaatagtcttactccattgtctacttattgaactaccataccaacctatcaagaaaaatatgctcacatatacaatagtaacatgactgtcggggttaccaagcactcctgggttgtaatttgaggccttctccataacagggaactcatgctcagtactgtaaacttggtttaaaaaacaaacaaaaaaaatcactattatgtctagagatctttagctaaatagacatagtgacaaactgccttttatacatgtgtgtttatacacataggtaaatgctattcttggtcctaatgcagtggttctcaacctgtggctcccaaccccttcggggttgaatgactttccacagagtttgaacatcagacagatatcctgtataatagatatttacattgcaatttataacaggagcaaaattacagttatgaagtagtaaggaaaatgattttatggttggggtcaccatagtatgaggaattgtattaaagggtcacaatattccgaaggttgagaaccactgtcctaatgaaagaagtctgtcttttccatgaattgcagtaaattaagagactcaggaatgctgaagattctgagaataagcaatggttgaaggctcactcctaagcacagcatttatactactccagttatggttcagggatcattatggacaactgcatcagcagaatggaggagccatgggataggggaataactgcagcatgccagtctctagaagtgatgtggcatggtaatcatgaattcacagcatctacaattacttgcactaggccttcaggagaaaggccttgccaaaagccagcactagatggagaagaggctcacaggaccctaccctttacttctgaactgaaagattctgggagattgggaaccattattttcagttgtgaatccattgctgagaccactaggctccaaaggttatttccaaactccccatcataaaaacagcccaggtgaagctcagtgggtcccaaatcaaacaaagtgacttgaatgggacaaaaagactatcaggacaggggtgggagagacaagagaggggtgagaacaggaagcatttggaggaaggacaggtaacactagagatgtttgaaaaagccatataggaacctattttataagcttcatatatacaaatatatgtatttgtacacatatgcagataaatagtcaaattggagttactctgtgcatatgataaaataaagtgtataacaatgtcaatgaatttaaaaaagagagagagtagggtgaaagcaaccatatatatgtgtgcacatatttatatgatatatacatataaatgaaattgacaaataaatttgtcaatgaaattattattattaattatgtgtgcatgcatgtgtgcaatgcataggtatgagtatgcacatatacatgtacatgcctgaggagaaatttggggactgagttcttgctttccattatgtgttctgggaattgaacttggggttcaggcttacacaatgaatgcttttacctgctgaaccatcttgctggcccttaaatacatttataaactagaatatgctgtgataataaggtactagaatatataactcccatactcagacctagtgttcattaaatcaattgagcatcctaaccaataattattatctagttgatggaggatgtaaagtcattgctacctaataggaagtgggattttatagaattataatcaaatttgcttatttagacattcagtctggttaaactgtcatgtgctagttctcattagacatattatttgtttactggtgcagaacactccgcaagtccgggggttttcatctctttatgactctttgctctcaatatcactagaaaacaatccctagtggaataagcaagcctggaacatgttcacattgttaatactgatacacataaaatttcctccagaaaccctcagagaaaaaacttagcttagatttctttcaaaatatcaaattagggagctaagggtgtcagcacaggttagtgaaggcaataatttttacaaaagaaaatgtaggtggacctctgaatttgtgcgttccccatcattagattccattaactacagattaaaatatttgcaaaaaatgcatctgtattgaacataaacagacatttatctcgagtaacatataaacaatacagcacgaaactctttaatagtgtttacaatgtgcaaggggacaggatgtagcccagagacagcttagcatatgtgaaagaatgtgcacaagttatttgcaaacattgcactgtttttatatagggaactagagtatatgaggatttgggtggtaaagaggtcctgagcccaatcccctgaaccaattaccaaggtatgactgtattttagccttttaaatccacctaaaatattcaatacaaaactttggtgcattaaattaaaatgatcagtcatgaatttatataagtaacattatagggtctgtctgagtgggttgtatttatatacataggaatatctatctatctatctatctatctatctatctatctatctatctatctatctatctatctatcttatctgtctgtctgtctgtctgtctgtctgtctgtctgtctctatcacctctctcttctctctctttatacatatatacatatatacatatatacacacacatatattaacaattaaaaattataggccatgaatttgagagaaagcagtgaatggtactcgggaggagttggaaggaggaaacggaaggggaaaatgatgtaataaaaattctaaataatgttaaaaacttatagtctgtttggaatagggttgatggcttaaaatgataaatcaactttcctgatccctttggtggtaaatatttgttaatgactagatttgcagttttaagctaaggagcagatgggatttagatggtgaatatggactgtcactgcagggatgaggcatttttcccaactgcctttcctgggggagtttggactgttacaattgcacttgagagaagcctggttactgagtctatggataagataaaaggaagcttatcttctgttgatcaatactgtcttgtttgagcttactgagtcatgtagagacgcatgtggtaatgaaagccattgggcaatagtacccaaagtattacccagtgtcctaagggatgtcagtgttttcagatggttactgaaataggttttagaccagctgtctgtgtaatgaagttaacgtacacatcgtcaggtcctgaaactatgggtgccaataaaaacatgttgagttttcagtagtagttctgagaaatagtctctaaactaaaagttatccagtttgtgtgtgtgtgtgtgtgtgtgtgtgtgtgtgtgtgtgtgtgtgtgtgtgtatgtatgttctcaagaagtacaatggttttgtaattaatgggtttctttatataattttctattttatgggattgttttgagaaagctaatgggtggtaagtttggaccgtctaagtttttctgaaaaaaatgttatcaataggaaaatagaagaagggggtcaacttgttcttaaacaccagcactctacttatcaatctttacaaagttctacagatagatcacatatctgtttctcgtttaaaaagtctgaactcttgggaagtcaaataatgtcacagcttcataagccagggatgagtggagtgaatattgcagcctggttgtatcttcagaagagtctggcattcttgctgtaattaattttaaagactctaatttgggtatggctttgtttggtggaggacgataagagcatatgaattcttggaaattctgactaagatcaatcttaactcaatgatttcacttgatactggtcatctcaaatactagacatgggctataaaaatggtctgctcttagcctgtagcctaaggagtataattttggagagaagttgataggcaaatgctcctggaagaagttctcttatacagtaaggttaggaaactacattacctattcttttggctaaccacaacaataaacacccatgtgcacctagtaaatcccaatgattgagtacagtgtgcataggtactctggaattagactacctggctgggtcacctggctatgtcacttgcttttaacattgagcctgttaagtaatttgtctacgcctcaatctaataatggtatggtatgtagtaacagtgtaataatatagctgggtattctaggaataacttgagattaaatttatagagagtgcttagaaatgtacttgataatctaatacttaacaaatattaatattgaagagcacccaaatatcaagaagagctgtgttcaattgtctaacattacttactcagcatgtttgactgactatggagacacatgtttatggttccttatgttccttaagtgcagtgctggtaatgttgatacttagaacatcacagattaacttgtcattagcctagtttaaaatggctattcacaattttgcatacattatgtcattctgtaacttaaaacaactgacttcttgccatctgtattttctctttcccttatacttaacacacagtaaattgaaacagcaagacagatacattttttaaatggagaagtaccaatattattttagaaatggcctgaaaaataaacaagaaatatctacttctctgtattggcaggggaatccctaattgcttggacaagtaagtaagttcccttttattccagcttcaccttctcactgtatgctgcttagcacattagtgtttcaagccagactaactcatttgatgctccatctactggaagcttaccaatatttggtttatagaatgttaatctcttgggatgcacaaatgattctcagtttttgtctccttagagagtcacctctgtaactgtcagtgggacagccatgtgtttaatggggcctccctgtggtacctgctctgatcatggtgaagcaacagtgcttcagtcaaagaggtgagactctgatagaacagaaaatgccctgatttatgctctccttaaaaccatcacatgtgggtggttatctatctttcaagagtgacagaaatagtaatgtaaaaatatgtgctctgtgctgtgcttgctcagtctatgaaagcaatctaataggtagccacctctaggttgagatttaatatactcaaaacagtcatttttccataatcgtctttgttttcttatcttgctagaattgaaagcaaacagcttagggtgatatttttgttagcaggttaatgacagaagctatagtaagaattcgtcccaattcttttcttagggtggtagcatacagaagttaattgaatagatagggtcaaaagtatgacaggaattaggactgatacacagaactaaaaaaaaaatcttctagagatgttaaactgtgtcttttgttaattacattactgttccaaggccctagggacaaggacagacagtaaaacacagctctccctgactcccaataatctgactggagggaagggttgcagcacaggagctccacttgtgaaccgacagtcattattccactttccaccagctttggaagcatactcaatcgaggagtaaatcatgacattcattccagcttgagattttgggttcattccaatacattgtttcatttctcagttgctttcattagtagaaaagcaaacgacaattctcaggcttagactagggagtaagtagtaaagaacacaagttgttttcatgcattctcacagataccacaacacagaattgaaagagaaaatacaaaaagcatgggccatacctgagcaatttctgaggattccccacccggaaacaggttccttgattgtggcgaattcagcttgccactttggttatagtctaatcatcgtatcaaactccaaaggttcagtggctttaggtttggtttacaattccctggagttaaactttaacttgccctgtctcttgcatccatgcagccctttgaccaggtaattgggtcactatggcctaaacagaagctacaagactgttctcctttcttgtttacaaaatgaaaatgtgttttgcattgtagtcattggagtcaattctctattggaccaagcttatagacataaatttaaatgtaggattcactccattttaggaaactaaatctgctgtgtcaaagtgacataatggacaaggtaatttaggagactattctgttgtgtcatacttttttctattactgtttcacatggagtaaagtatagagttttaggtcaagtatgtaaattaatactggcttacaaacgcaaaatacacacagcacttatataaacaagtagctgaatttaggccggcacaggctagggtaaacatttcatagaagttgttcattcagatttgaagagagagccggctcttcagtaagagccagtgctgttgttcactgctggaaatctcagtagtaaccctgtttcttaaagaatagataatttgtacttctaaaaaaatataaaccctagggttaaactattcagcatgagcaccagtctctataagaaacctcaaagggttttttttttttttttaaaaaaaaaaaagctttttacaagataaaaacaaccaacccctccctacttttgagtgaattttgttttaaggcttataaaacataggctgtgaaactggaattaaaggatgctttcccttgtcttcaggtcaagtgagagaagtctaatttcccaggaaccaacttaggacatattttatctattaaaaagacacaaagcaagctagggatgacagacacaatggaagcatgcctgtgactggggagaagagggctgaagatctattgcagtgttcattctgtctacagctttacttattctatcattaagccttgattgacttgcattttcttttccagtgagtacatacatgccctaacaaaagcacatctgtaattattgacttgccctggaattagaggtagcatttcctgcttctcatgtatagactttcacagctggacatctctacctatttcttctagcaaatggatctgctcatcaagaaccttcttggttttcccaggagaggctccatctaagcttgtctagctcctagatgtaagaggaatttttactttgagtctgatcccacaaagaattcttgatattgtgagactcaagatcctggcagcagggggttcctgatcctgggggaagtgcctgggcagtgctaagtgaagattaaaaactttaaaaggaaagcagggccccttagacaattggtggagacagcaaagcctaacaagaagaaacaggagagaaaaggagagagagggggaagggggagaaaaagagagagagagacagacagacagagagacagacagacagacagacagagaccaaccaacctgcagttatttcttaacaaaccctttctgagttgaaagtgtattgagttaaaaatgcacttcctatgactaactcatgtaatgtcacagctgaacagtagcatacggagtcggtttccctcctgactgtccactgactgggagctgtggcctgctgccactgcccagcatcattggagagtatcctgtgacatagcactaggaaaagatccaaatttgaaattccaagtatgatttctcctggaatgcttgccagttttacagcagcgagtggctaaaggtatccaagaggagtcagtgtgagtaagggcgggaccagttttgattgacatcccagttcaggttgctgtaacagaatatgacagtttctcagggatctggaggctagaattacataaccaggtgccaataggggctcctttccttgagtgatttttcttggtatatgaccatggagagagagattttgtttgtttgttttatattgcattttcaagacaggatttctctgtgtaatagttctggctgtcctggaactggctttgtagaccatgctggccttgaactctcagagatctgtctgcctctgcctcctgagtgctgggattaaaggcatgtaccaccataataatattttaaattacttttttccatttgtgtttgtgtgggggcatatgcattccatagtgttaatgtggaggtcagaagacaacttaagttgattttctctttttgcccatgtgagtcatggggatggaacacaagtgatcagttgtgttgtcaggtgccttcaccagttgactgtctcattggctagagatattttctaataaggacatatacactatgcaaggccctgccctcatgacccactctaatctggttatcttcaaaagaacctatttccaaatgtcatcgtggttagggttttaacatgaattttagggagaaagcaaacattcagttacaatagattcacataaaaaagctcagtgtcttctttgataggtcttgacatttcacaggtgaggatatgctcatgtcaaaccataatccacatgttactcaggaggactggtggcaataatgaatttgagagcattgttaggttatgatctttcttttccaaatcattttattataatagcagacttatgagggctattcactcatggtgcatcagtagtgatgggacaaagaatccaccagatcatagtgggattagctcaggacctcgattccattagtctaaccatggaaatccactatgctcaccatgacaatacttacctttgtttcattaaaacagccccagtttaaatagtgcctggaaaaataccagtttcccactagtttattctgcaaactactggagacctactttttcttaggagcttttgtgataaggtaactgtttaatgtcagagatggtcggttggggagatggctcaagcagtaaggtacctgttgtgcaatcatgaagaccagagtttgggtccctaggacctttgtagaaaagtgggcacaagcctataattctagtagttgggaagaggggataggtagagccccagactttactggcctgatactctagccaatcagaactccctgttcggtcagagaccttgtttccaaaaatatggggggactcatagaaaaaggcactttgatgttgacctctagcccccacacaattgcatgaacttgaatgcacaccaaacacatatgtgcatatgcaaacacacacacacacacacacacacacacacacacacacacacacagagagagagagagagagagagagagagagagagagagagagagagagaaaccacagacagatacagcgacatggagatgcagagagaggggagtctcttagtagattatggaactgatattgcaccaaacatcctaataggaagagtaagtagtgtctatgagaactttctcatcttaggcaggtgataactatttaaaatgaaaagtgatgacctagggagatttctcagataggaatgtgcctgccatgtaagcatatgtgcgtggattatgaattatttttttcgttgactgcaagtttttaaaatttgcaaattattgcaccgggttttagggtttcatggttaacagacctgaaagaggttgcacgtgtaaaggagtaccccaatagtaagctcattgcatctataaaaaatgttgtgaagaagcacagcatgctaaacagaacataaatcataagaagcaaatgcaggctagggatgggtaactaaggtaacacaggaaaactctagaatacaaggtctgaaggtgtgagggaactttctggttggtggaaacagtgcaggtgaagtctgagttaattgagcaaatgacaagtggagccaattgtgagccccaaagtgaaaacgagttggtgacagagtcaaagccagctcattagaggttatgtgtaacagtgttacaaatttccagtgttattctgttgcaatggaagttactgaagggctaggatgagggtagccacctgtactgttcatattgtgagtacaaggtaaagtaaaatttactatggaaaatcattacccaccacacactcctccccattgtttaaattgtcaacctggcacaacctaagtctagagggactatctagatcagggtggcccagggtcatgtctctgtgagattgtctcagctgttgtaattgatatgtaagaaccaccctgacagcaggtggcagcattccctggtttgaagctatggactgggtaagagtagagaaagctagctgagcaaccaagggtgcatgtgttcatttctctctgctcttggaggtgagtgtgatatgactagctgtctaaaccacttgctgtcttgacttcctggctatcatcaatggtaacctggaattgtgagctaaaatgaaccctttcttcccaaccctaagttgctgttgctaggtagattattgtgacaacagaaattaaacttggataaccccatttcagctgttttagaattattctattctattctattctattctattctattctattctattctattctattctattctattcccgcatttattcaaatacttcatattatgggtttcaatatgtgtcattgacacttttgtctcacagaggcggtgagaggtgatgatagctgaggtgaagtgttgccattggggatgacatacataaggttcagtcaaatgtggaggtgttgaggcatagaaagaatatgggaactgagggagggatacttggaacctttgagaagaactgccacattgctgatggtgagactgtgtgctgagatggtgttactcacagaagaagggtctcaaagaggttgattgaatcagataatttccttatgcagtggttgtccccagtcacttgtgtgacatttatttggctcatgttttttaaaatctgctcttgccatcttattaaatttaaactaaaagttattgattgtgttttcactggcaaaaaataaagcataaggctttggaaaacctaaaaagtaatcgaaaactcaaagattatcagctgttaatataagaagttttcgttgagggccctaccctgcctggggagtggtgggtggatggggtggggggtgggatggggtgggggtgtgaggggaaagagagggagaagggacttgaaataagcttgttccctaactagaactaataaaataaaataaaataaataaaaaaaatatataagaagttttcttccctgccagcatcgtgttctccccctcacgtctcagtgaaattttccttcactgattttaactttctaggaggttttgaatgtttgagaggtgggtgggtatataattaaccaaaagtgagcattctaaatgggagtgctgtgtgtcagatacactgtgtggggaagatgcttatttcatgtccttgcttattacgtagaaaggacccagatcatggagttaggacttgggattgcagtccaggccatatcacttaggggctgtataatgtttctgccccttctcagagtctcagtgtcttggctttaatgaggaaaattcatcttgctcataggttattgttcataatttatcaaatgaattgggatgtgtggcagtagcttgaaaagcacacaatactgtacaagtagagagtagactaatggtgaagcaggttatgtgtgatccctgccagaagttgtcaatgtaacatctaggacttggagggtttgtgcttgctctttggaaacagcatttcagacaaaaagtctccatggttttccttatgtctgcaaggctttgggagatagcagtttggttgagtgagaatccgtctgctttcagactagtttggaacaggatgttagaattttgaaaaagtattggttttgtaactacagccatctagtgttcagttgaaacatacacacctccagttgcatttgatttgcccagaatattggaatagcattttattgtcacaacattgaggagtaaataagaatttatatgaagtgcagactacatggggaaaccatggcaaccaatgggagctgtgagggtccccttttttaaaaaccacaagttggaaatcttgctcctgtccgtcattgttctttctgactgtcactcactcctctgggtaatgaatgttctcaaatttagaggttttaatgtcacccatgttaaagaatattgattgcctttaggcaatctttataaagatttttattatttagagagaaagagagggtggtgtgtgtgtgtgtgtgtgtgtgtgtgtgtgtgtgtgtgtgtacacgcacgcacttgcactcaagtgctcacagtagcatgcatgtggaggtcagagaacaggttttgggagttgcttctctccttccctgtgggatccagggactgggctctggtactctggcttgctccgaaagcacttttagctgctgagcccttgtgtcactttttaaaaatgtcctaatttaagagctcaataagctcaaaaatagatactggtttttgtaatacgaacaaccttaggaaagaaatctagtgaacaaatctgctattttcttctagtactgttagaaaatatagatccctgagcctttaatttatgcaccactttaatctccctcttgcctctcactgaaatgtttgcacttaattttttagtatactaaatactgggttgcattacgatgtttccacacatatgaatccttgtctgttctctttactgcaaataacgtaagtccaaaggaaagccttccttggatatcagggaacttattaaggagacattttcacataatgttcctcttattcatgctgttctttctttcttcgaatgaattttagtgaattttggaaaaaagagatgcactgttttgaaatggtagggaacagtgggggaagccacgtcaaagcagtcatatgacattgggtcagcagcacactaaatgtccaacagtgggtcatgaagattaaaagggaactatgaaaattcccattggcagatgacttcttagccattgtgatactatagtttgatgagattaaaagggaactatgaaaattcccattggcagatgacttcttagtcattgtgatactatagtttgatgcttggtggacttgaagagacactggtacaaacgagctgtgcccagcagtcatttaaagccaagctccacgactctacaccacatatacttggttatgatacaaacaacagggtgatttgttagactgctctttgccattatttcaaagaccgtcactttctacttattgaacagatgttacctggacagcagcctcaggcaggccctccttcaggttttctgcagtagctggcagttccaggtgtattactcagccctctgtcactatgaccatatacccacacataaccaactttgttaaggaaaagggtttgttttggctcgtggtttcaaaagattcagttcacattcacctaccttgtcactttggtctcacgatagtgcaatacatcccattggtaatgcgtggcagagggcacagctgaagcaaagggcgagaggaaggaactaaggcccaggatcccctctgagggtacacccaagtgaggaaacttcttcttgctggatcacacttccatagaatccacatatatattctcctctttcacataaatatacaatagtcccataggctggggaccaagctttcagcatcataggcctttagacattttcagatataaactatagcacccctgatgaccttcatatgggacacaatatgaaggcagaagaggtagaagtgatgatcctgatgctatggaggcctgtgtgtgtacacgtgtgtttgtttatatatatatatatatatatatatatatatatatatatatataatattcatgtttgtttttaattggtttaaagataataaatttttcaatagaagaatgcccataaaagggtaatataatcacagtatgtttgcacaactatacaatgcactgtttaaaactgtgcagctaaatagactggtcagtagtgagactccgaccaaatgaaaccatacttcctgggctggcacagagtttgctccagaaagacagctgtggaggacttcccacacatctcttctgatccagtgtgggatggagaatgcagtgagagtcactggctgcagaatacacctgctgtgtaaggagcagggttttgaggactggacaaatggactctgctcatcccttcctccaccctgggagagccatggttaaatacattgtcttcttaccccttatttttttttcctggtctttactttgtattcatcaatctcaccttacatgattttctactggactaagcatcaaaagatcacagcttggctctatatcttcatatacagctaagtgctgctaggctgtaggagaaaatggtatcaggaacaattggcctatgttttcccattgtctgttaccacctggaccaccacacccatcaatcattaacttccctcccagcagtgaaagcccaaggctctttctaagaccccccacctacactccattccaccagttctttgtagtgcaaaacatctaagaggctcctacactggttagagttaaagttgggtctaagtaggaagctcaaagggtgcttttatgtggatcatcaaaacaggatctccagtccacaggaagtgaaaggagtttggaagcatcatcagtttgagaaaattgggtcagaaaaagtctaaacagtcagagataacagaaggttcaatttgagaaggacacaaagaacaagaataagcaaccttaaaatttggctttccatcctgtactcacaattagatcacactggaatcctgagggcagtagcaatgttaagagcctggagagaagggtggagggcagcggcttagcatttcacttctcaggctagatttcatgattatttgattatctgaattctacttcttcctggtgaaatcttaatgaaagtattaatgttagaccccccccccccgaaaactcaagtatccggggtcccaggccacgttcgaggtcaccccaatcaccaggcggattcgagagcttgctgcaaactgcacgaggctttattgtaatttaacgagctaaccccatgttagctcgggtctttcacccacccgccatggcagatggctagaaaagacagtttgaagccgctgggcacagatctttatagggcagcgtaaggggagtgtctaggggtacacacaggctcaggattggtgtgcctccaggcttggagggcttgccctgtgttgattggtcaactggttgttatggcccataggccctgccagggtggttgctatgctctctacgtcattgctgtgcgcttgtccggaaagcacacccaggtcgtaaagcatagtgccaccagctaacttctgattggttccttgtcacgagacaggcatctgacctctaagtgaccaaggcaggtttatggcaagcacgtgttcggctgttatggctgccgtaagggaagctggtcccttcattaacatatacatatacacataggtgtgtgtgtgtgtgtgtgtgtgtgtgtgtgtgtgtgtgtgtgtgtgtattccttttgcagtcccagggaataaacccaggtcctggcacatgccaggtaagtttcctactattattcctattattattcctaagcatttctggtagggaaattcatctacaacaatcagtcatgcaagtaggctccacaaggccactggcgaggaagggagatgagatctctaatgcagagtttcctccaccactagaccatgaagttatacatcattaagattttcaaggttttaatatataaagtctgttgttctaaaatagagtatttcaggattaattaataaaattataaaaagcaactaatccattgtctggcatataagtatactgtggatgttagctggattattgaagaaaagcatgactattaatgatatggtttcattttccagaaaaaaatatcagtaaggagatattctggatagttttatgtcaacttgacacaagctggagtctgagagagaagggaactccaatttaaaaaatgatttcataagatccaccgtaaggcattttcctctttttaaattaagttttacttaaattaaaagcaatcttattttatataccaatcccagttccctcaacctccagtcctcctattcccccaccatctccccatcccacccttcccaaccactcatcagggaaggtgaggcctcccatgggggatcatcaaagtctatcatttggggcaggtcctagaccttcccccatgtatctaggctgagagtatccctccatggggaatgggttcccaaagcccattcatgcactagggataaatactggttccactagcagcagtcccatagacttccaagttccccaactacacccatgttcagggggcctggcttggtcttatgtaggttccccagctgtcaatctggagttagtgagctcccatttgctcaggtcagctgtttctgtgggtttccctaacatagtcttgttcgctcttctcatcactcctccctctctacaactggattccaggagttcggctcagtgcttaactgtgaatctctgcttcagcttccatcagctactggatgaaggctctgtgatggcatttaaggtagtcatcaatctcattataggggaagggcatttaagggtagcctctctactattgcttagattctcagttggggtcatccttgtggattcctggagattttcctagtgcccacaactccctctataaaggcattttttttttttaaattagtgattgatgggggagggcccagcctatgtctaagttctggcaagactggtcttgtaatttctaaaactagactctcatttgttaaactgggggcttctcatctatactcagggtgttgtgagcacagcttggggatatgctctgccgtgctgagcacagtgctttcctcccacattgttttccttcatggtctagtggtggaggaaactcagcattagagatctcatctcccttcctcgccagtggccttgtggagcctacttgcatgactgattgttgtagatgaatttccctaccagaaatgcttaggaataataacaatccaaacagcacctgcctccttattcttctgtttatttaataacttatctccatctgttagttacttttcaattgctgtgaaaacaaaacaaaacaaaacctaaaaaaccccaccatgagcaaaggaaagaatttaatttggggcttgtgatttaaaaggttacagaccatgcctatggcagggagcacagcatcaggcaggcatgccctggaacagtagctgagggctggttcacatcttaatccacaagcaagagacagagggagctaaggggggatgggttgggtttttgaaatctcaaagcttgtacccagtaacagcatacctcctgcaataacgccaggcctcctaatccttcccaaacagtttcaattggggaccaagtattcaaacataggagccaatgggaaccgttttctttcaaactaccacacccagttgctgggtttgtttgtttctttgttttcctgtgttggttttgttattgttattgttgcctgttttactgaagactacataaatttgatggtgttaattttgtttgactcactcctcatatatttcaagcatattaaaggaagggaaacaaagggaagtgactggggtggggggtgggggtgaggtgaggtgacaggggtggggaggaggagaggggctgatgggacatttgaacagccaagggggaagggaatcaaggagacaaacatagacagaaagaagagggcagatctcagtgtggctccagcctgaaagtcatgagtctgcctgggaggctgctggatgtgcagattctgtaaggctggactgagtttgcactttcctaacaagctcccaggtgatgtcaaggctgtgtgagcaaaagtgctgatcaccactgtaggaataagacaaagggatctgttagagctagcttcataggtgactaggacacatatcaaagtcagaactgctgagaataaaatagacaagttagaagcccaaagggagcagcagaactggaattcggtgactaccagtggagagccaaagagaccaagattaatgtatagcaaagctgacttggagtgctgtgtttctccagggaaaataacagaaatttttatttatatcaaggaaaaatgacaccattggcattgattccaacattactagattttgaatttcaaatgagaaattatgtacaccattcaagttaaaacctatacgccctggcaccttctgagggtttcaggactttttggcaagcaatacacacagactgaggagtttcctagcagtaggcactgctttttgtaatgagacaattatgcctgtcaagtgaaatatgcatcagtgataaagtaacaggtccttcattataggtacacacacacacacacacacacacacacacacacacacactcacacacacgcacttaaatagctagtggtagacagcatgtgtttaggattcagtaagattttgtgtttcatatttgtagattccattttttttttacaaggttgtgtttggacttaacaaatataactgtatttctattacctggtaaagatgggaagataataaattagggcttcagctgtaggccactgttatatactattcttattgattttaatgacacaagaacaggcattaaacttgcaaagctgtcagaaatttatctcatggacagattccaaattcaggtcatacttaaggggatgctgaagaggctggtttattgacctagcaagaattttattagctgattatccatcatataaaagtgaagcaaacagattcaatacctactgggtgtctgttatgtaagaggctccttttcaggcactgggtagaccatgaagacagaacatctgggtgccagctttaggatgcttaaagccttgtacagatgcttaagacaggtgctcggataattagtgtaaaccatgcaaatgtacattctactagagatccaatcaggggccaggaaggtcttaagaagtgggcttttcatcagcagggatcatggatatgattttgtactcagtaattctatcaaagcataaaatacacacaactttgatgctgctgttacacaaaatttatactgcatccagatgttgatcagttatatggatctcaaacacctacaattttcatttaccttttctatggtaagtgaagaattagaatcattgtaaatctcccccccccccccgaataaagctaaaacaggaatcattttagtagcaaagagattgggctaacaaaactttattaataaaattctggtggagttactttataagggaatattataaagctgctaagaaccacaagggacatctgtgaatgtgtgcctgtgacatgttaggcgacaaaggttaagtgcagaaagctatgaagtatgtaactgtttattttgaatagatactaaatctctctggagccggtagctctgtttcttccctacccccagggtggaggcatatttcacactgcttaaatatttgccgtgtgaacttaagacattaaataaaaagttaaaatgtgccaggcagtgatggtgcacacctttaatcccagcacttgggaggcagaggcaggcagatctctataagttcaaggccagcttggtctacagagtgaattccaggacagctggggctgttacccagagaaaccctgtctggaaaaagtaagcaaaacaaaaaaggaaacaggaaagaaaatgttaaaaagtagcagcatcagccaaagcaaagaaggtggagttgtatttcaaagacgagtgacgtctgtttggctgtagcatagggcagatgtggtacaaatgctgaggaagctctttcataggtgcttcggggagccgtggagtagagaagccctgatagcgtctgcactcagcaaatgggaaccagatagtacgggcggcagcaggctgcatagggcacagggcactgtggctcctcaggaaatatataaccgggatggcagtgtagtacaatccattagaccaggcagaaatagtgttgaatgggattaggtccgttcaatgttttctgatttttctcagcctattgtctccctagcaagaatctagcatggcacggttctgaagacattcatcatagaagaggatcttgttttctttgcttgactatctcatagtctccctttgtgttcccattacaggccattaccatctctgaaagtaattacgagaactggccacccattcacaaagttgggatgtgagaaacagaataggctgaacttgtttcacaccccaccccgcagagcgttagatttacagtagctgactacaccggcaatgtgaaaagaggtcagtgacaaatttaggttctgattaaatcaggtagcctgggaggcagccagcctatcatgattgcacaaggagaggggccagaagtgcagggagggtatgtttccttctccctctctctgcatgaagtgtctatccatcactccccagtaaaaggagaactacttgagtagctttgagcactttaaattttattctgctgggctgcaggtagtaatgttgatcctatgtcagacaggccaagaatcatttctagggtttattttcttcatcttagagccttcaagaagcaactgggtttttccacacctagaagtgggctattcaaagatctcgagtaagccatgcgtttgaagggtccacagcatttggaagttctcttaggaggaaatgggccaccatctaacacaacatctggagcaaaattgcagagtctagagataaagcatgcctggcactgtggctcatatggttggagcaaggtcagccaccaagtcccttaggcttagatgaagtaattgatcttagcttaccctctgagatttgagccccatctcctcccttatctgccttatgctcacttaaagctcatacaatccctgtggagaggatggaggttagactcagtgagcatccttaccatcttctgggaaaagctctgcccacctttcacattagactcttacctcatacgtcacctggaatcaacaggggggttgaatgggtttagtggctctgctcgttttggccacatgttcctcagcaagtgtgatgatttgaatgagaaaatgtctctcatcagctcaggtgtctggacacttggtggcactgtttgaggaagccatggactgcttaggatgagtggccctgctgggaggtagttagtcactggagagggttttgagagttcatagactcataccatttccggtttactttctctgcctatgtgtgtgttggttatgtcagcttcctgtttcagctgtctgccaccatgtcttccccactattgtggactttctgggactgcaagccagaataaactctttcttccataagtcttgcttggccatggtattctactacagcaccggcaaagtaactgatacaggtaagtgtgagccattcagagtgaccgacatctctcctcagcagcactaaggcaaaatcctttcctttgatttaaaagccctccctgttttgctctggcccttgcttcttctcaggtatcaactgtcaattatttagtttcacctctcctacccaaggtggaccatggtaagaggtggcaccgaggaacaggctcacagcccaggtataaccagcatgacagttggaatttgttctctgctgtgctggccattctaggagaatgctgctttgaattctattatcaaatgtccccctttctttctaggccttccaagggcgtggtcataagagggacatgaatagttggtttgctgtagggttaagcttttcctttcaatacatatgtggacctgcctgcttggttattcttcccttcatagaataaacgtattttcatgagtctcaatcctcagtagttacttcatagaagcatacatgcagagacaatgggataaatgaaagaacatttacttagatggaaagatttgaaataaatgtttgggtcaggatatctgtggactcagactatagatttttgcattggtcttcaagccaattgcactggctctaatttcctcaagtctctgtgagtaacaggttgcctcattcattctccctcaatgatatactcaagcaggcaatacattttcattttggtaatgatattgatgttttaacataaattttgaaatagcagaattaaatgatagtttgatgaagacttaatcagtctagaaaatttgtctgaattgtgctacatcctagctctgttactattaatcctacagtggttccatagcaaccactttgaaacaaaggtaggtttgcaagatggttataaacaacttttgaaacacagacctggttgcgattcctggaataggcagtagaaccatttgtagtgaagggtacaggtggggcatagcccagtccttgagaaatagaggtttaatcataaacaagaatgaacctagtttgtctttattataaggtggcttttaagcctaaaatggaggcagcctggttcttcattacctctagtatttcatgtaaacaggagcactttctaaagtcatgaatggctgcttgttctaaagtttttagggggcctgtgcacataagaggggtagccaagatacttgatccgactccatggaggctgggattggttctctcagcacatccttggatggtagcaggggtattaggaatgtttatatgttctttgtgaacactagccatcattcaattttattttcacacatctgcatgacatctgaattcttgacacatttcttgagaatcaatattttaactccgtagaagtctggtttcttggttgtgataacaggctccaatgaatcaaaactagaagaaaaaacatttgaaatgtattctggatcgtcgccagaaactattggaaagttggagaagtaggttataaacacaaggagatccaggggaggtggggcattgagtgattcttgtccagactaccattgtggagatggtctacttagaaagtcagaactgctatagcagcttttccatcactaactttagagcattctttctcaacattgagattcaaagttctgtataggaacaatctgttacccagttgttagtcaccttcttctactttgatttcttaggatgggaaaatagtgacaggcagattggttttaaaagggggtggtacttaaatgacagaccactgttgcatatatgcactgtagatgtagcttcttctagctgaggtgtaaaggcaaaagatgcttagtgtctatccccatgcctttcttgctctactataccagcctctcactgttctattttaaagtctgacttattgaagttctctttatacagtctccttcctgttattctaaaaacaattttcatctccaagggttagctctgacttcttcttctatagctgacataacttttacaggtagcatggcttattcagtaaggataaacactttttcctacaaataagggaattccacaatcaatacagttttataaaatggcttctaggcttatgatttagtaggtaaaactgtcaggactctggggatttagaagatggctcagtggatgaaatatttgctctgtaatcatgatgacctggagttcagattccttttcaaatgaaaagccagatgctgtggcatgtgtctatactcctagtgctggatgggtagaccctggaggatcccaagtgtctgctggccagcctgcccaagttaattggtgaactacagggggaaactctctctcagaaaatagggggaaaaataaggtaagaaaacacataaggtcaacctctgtcctctatgcatgcatacttgaacatacacatgcataagcacagcacacatgtacattcacacagcacacacacacacacacacacacaacacacacacatacacacacagcacacacacacatacagagcacagacagcacacacacacacacacacagcacacacacacacacagcatacacagacacaaaacacacacgcagcacacacacatactcacacagcacacacacacacacacacacacacacacacacacacagagcatacacagacacaaaacaaacacatgcacgaagcacacacacagcacacacatacacagcacacacacacagcatacacagacacaaaacacacacacacacacacacacacacacatacacacacacacacacacacacacacacacacactaggactctgacctagagtctatataattttctccgtgtgttgtttatgtgtgtgagtgagagagacagagacacagagagacagagactaagagttagagacagacagaagagagacagagagaaaaagggagggagagagtgtgtgtgtttaaaagagacaatgcagccatagaaaagaaacaattgctttgtgaggcaaggctagtcccattttgtcagttgaagaggggacaatctagagcccttggctcctctctggatacattgtgaagagcaattgtaagtatgcatcctctttgcctacttgtctctatgatactcagtgttccagctgcaaagtactaggcagatgagaatctcatgagcacctcttatcatgattgctacctaagtgggcagttgcggtcatgagcagatcggtgtgaatttcattttgtttcagtggttattccgttctgacagctgaggttctgaacaggaggagaataaaagacaagcaggaggcaagtaagtgaggaagatggatttgaactgagaaaacacagtaattgaagaggaaaggagagaaaaagctagccgtgctttataaagatattcagaaattttatggtatagactcagaggctgggctggctaaagatctttcattcacatgtgggatttaaagaagctggtctcacagttgtggggagtaggtgagtagttcctaggaagggttggagaggggttacccaaagagattgattaaggagtacaaagcatagttagcttagagaagtcaattttgggtaactatggttaataatattcaaaatagcatattgctttctctattaagaaatggtaaatgtatgcacaaaaattttaaagttactcttctatccagaaccatatagatatccctgtacacttgggtgccttggtgttctctgggctctgatgattgaaccaggaaaaagatcttgaccataatatacctatgcattactcagccagaaaacattatggttagccaaaccaaccaaattctgatttacaaccactccctatttttctttcttgttcatatttgctgaggaaccaaggtagcaccagttggtgatgggctaggtgttaacactttatgatatagagtttggatgttggctacagggtaaagtgaattggaagactcattggtggagaaaggaaaatcaacctaatgcagaagtagatattagaaaccagggggagagaatgggagaaatgaacaactgcttttgattaactttatttctaatgagaataccactgttatacactgagaaaatggttaaataggtacagtgcttgctttgcaagcatgaggatctgaatttggatttccagagtccacatataatctgaatatagagcatgtgcacctgtaatctcagggctggggaggcagatacaagaggatccttgaggcttattggccagcctagccaaactagtgagcttcctgtttagtgagagaccttgcctcaaaaactaaggtggaaaaaatagaggaaatatctgatgttgacctctggcccccacatgcacacaaacatgtaaacacatctgtaggcacatgcagatacacacaccacatacgtacatacatgccactggtgctcatttattctttttctgtcattggtccaggaaatacttatgttcatgtcattaatggtaattttttgtcatgttaatttgtttctcttccttgtaaccataagggacacagttcactgaggagccaaatgcctgatcacttgaagtttattgttgtagacctcctgtcctgtgctaaattttatccttttccagggtccttttgagagtgaggatcattgaaaagtgtagtcctgacttcttgtatgcattctgcaagagtagattcttggtctatggaaatgggcaaattaggtgtgaaggaaaatggagtggggaagttagttgtgtcttcatttacatagatgttgcttctttaaaaaagttttatttttcttttatgtgtatgggtgtttttatgcctgtatgtcttgtttatcaaccatgtgtatgccagaaagagccagatacacaggtaagaggctcagagtcagctaggctggcctggcatgtgcttttgaaagcttaaaggccatccctagtagtacacctcttccaacaaggtcacaccttgtaattctacccaaacagatccattaactgaccaagcattagaatatatgagtatgtgggactattctcactcaaatccctaaacatgtcttttcttcttcctcatatggagtttgaacagcaaggaagaactttataaaatgttaaactacagaccaagggctttccacttaaactgccctttcctaaccattaaataagtaaaaaaggtttgagtatgatttgcatttctgctacctttagtgtgtagagaaggcaaattggtcctcaagacagggctagttcaaactgtcctgggggaggcataacttcttttaaaaagccgttgtgttctctgcttataaaacctttaatctaggctgagaacagatagcaacaagttttagtagtattattagctgcttagtgcaattacatgttctaaaattatgattctaaaattactagtacagaatttaggacaacgtttagatttccaggtcagtgctccctccctccctccctgatttagaaaattttctgtaagaaatatcagcagcccagatcttctgtaagaagaagacagttttgaatggaattcaagcatcagtgagtgagaactgagttctgtcttgtaagaaagatagggtttagtctattcacaggttgttattataggtttgctgggtgctcatcgttttaggaatgtgtattcaaagtgacatgaggaaacatataaaggaggaaacagaaggtgtaaaaccttagccaaaccaagctgataaccgacaaccttctgtgtgatggtgcagcagaagaactgactgaggagggaaaaatatgttgactacccactgtgtatgcaactatcttaggggaattccacaagctaatcttattaatgcgcaagagactcttgaaggaacagtgatgcttagtttagaatgaagacaagttgggcctgaaggaattaaataacttgctgaaaataatgtagcttagcagtggaggagccgtcatttgaacccggatgtgctttgtgtctttcttcattcatccattggttgttttattccttcttagacttacagtgtcataggagccaagggtcaaagcagtgtctaagaagacaaaatttcagccccatgaaccttatattagtgagggatataggtaatgaccagagtggaaacaaaattatatagagctttgtaagaatcatcacgaggagtcaggcttgtgttaaaagtacacaatgggaaatcggtgttttaaaccaacaatgacactatctcctttccatttttaaaatggcactggctgtttgtattggtgatggcatagggaaatgtgagagaatgaagaggggatagttaagaggcaattgctctacacatgagtgatgactcttgtagattaggcttggaacatgaaggggagtggtgagattcaagactggttattacttacaagtggcattgctttcattacaatttttaggcagggagcaactctcctatccagacttgttcttctgtctttatgacaggcttgtctatcttcaaattcagtgagaaaatgaaggtggatgagcaacaaccagttccagggagtggactaggggcaggaaaaccttattgtatgatacagttcaaaactcacatgttccctgatgcttttttcattgtctttcttattaacctgcaacagactgctaattgccatacccttgatttaggactttggaaataaccgttttaaaattttccctttgtgtaattttagtttccaaatccattttaaggcctggaaatataagcccttatctgtgctgtgatttcaaaacagaccaagatagcacttagatcagaactttcccagcatcagggaatctgagctagtcattgttggcctaagaatgaaatgtgctcattaaccaagaaaattggaaactaggcagcactttccattagtgtgctgctttctaaagcattaatagaccttgccactgctccagaaactattaataattcttcccttggtacccaatacaatactagtgacccaccatgagtagggcatgtgattaaaattttaaaaattattcagaaagtatatatatgcatatataaacattaatctaagattttagttctgaatattagaaactaacatgcatttatttagcagagacaaatacccagatgttacaaagtagcatttgtattttgttacttattcactatgtgctcatttgtacagtgctagggctggaacccagggtctcatgcatgcttatcgtgtgctctacttctgagccattccagcatctcaccccatacagcagtgttttatatagttgacaggataaaactgcatctggtatatggggatcaccagactcagaaaactatcaggaatccaggtatgcttttcctcttccttgcatcaagctttgtctctgttctctagtatggaatcaagctcaaggatcggtctacccaggcaaacccagctctgtatgtggtcatgttactgtttttcccttcatcagcagtgaagcagatatcttgggtctgtgaatttcagagctttctgtacctttatcaatgatgttctctaagcttgaggtgtagggtctgtattgtaggggtttcagttggaattgagcattccatagttagttattctccacattctggccacttctgactttctgtaatagtatcctcctacttcgtgtaaacaaagaagcttctttgaggaggcatcagagataggttaagtatttacaagaagtaggaataacactggcagcagtaggttctgatttaggtttcagtctcaccagtcattggtagttgactaagttaatagtattagccatggattccctcctattgagttgttggtcttaagtccatttagaaaactcttggctactccaaagttataaatgtcactattgcacctttgtggataccttgccatgtgggccttggctgtgatttgcagactttacagttcaataggtctagtgattgcttttctcctttggcaacttgcgaagcatcttctggtactatgagaaaaagtcctcagaagggaggcttcttcgtcagttccagctcaattcctcgaagtcttgtgtcctatgtgtatggtgtgttcgataagatggtcttacctttaaattctggtagagaaccaaaggcaatagcaatgacctatattgttttggggcatctcttggacttccattatcaacaacttgaaattctcattcctacttctagagtttttgtgagatagtctatggctttttgagggagaattatgtatttacacagcacagccaagtttatttaaactaaatatgtatttattatatacataaatacatatgtaatataaacatgtatatgtataaacatatgtgtgtatgtacacaattaaataattttggtaacctaaaataatatttcctatggcttttttcaatatccttagtgttatttatctatcccctccctctccttctatatcatctttcttctctcctcctcaattaaagaccctcccctaactttcccagtcctccctttgtaggacccgtgccctgctgttcccctctctagagcatccctcccctctgcccaacttctgcagttattccaggttatacactcacatctaaagatgagaactaggattcccatctaatgatatatgtgatgtttgtctctcagggtctgggtcaccatactatttgtaatatgttctagttctattcattaacctgcaaaatgcatgatttctttttctttgtggatggatagaattccattgtatgtatgcacacatttttgttatccattcatcagctgaagaacatttaatttgtttccatttcctacctatgagatcatttaattttatgtgaccctgtaactgtgaggattgggatagatttcgttttcatttgttttatacatttacttttatactttcaggaaatataacaaaagccaaaagctggttttgttcatgcccttcttttggtgtcacgccatccttttaaacacatagatacagtgtgccacacaccctctgtctaaacgcagcacagccatggtgagatttgtgccattgcaactgctcatactctagccattctcactaggctgagtaaatgatatatcaggatccaggagtagagcactggtgctttttttcatagagatactgtttattaaaactttttggacaggaatcttagaaactcctaattcagtggttctcaaccttcataatgctgtaaccctttaacacagttctcatgttgtgctgaccccaaacatagggttatttttattgctacttcataactgtaattttgccacttatgaattgtagtgtaaaaaatttgtgttttccaatggtcttaggtgatccctgtgagagggttgttggatctccaaatgggtcatgacccagtcgagaaccactgctcaattgagaatagaattacatagccaaatgcagaccttatacaattttataaggttttatttaaaccaaaacacctctatttctattttgtctgtgactacttttatcccacgaatcactgtattatatcaacctagaaaacctgaaatttttatccagtccttcataggagaagttcacctattagtgatatatataggataaaacagaagaatgtgaggcatggtgttaggcaacttcacactgattttcacattaatttgattctcattttacagtcttgaacctatctgtcttaaaaataaccctttcctattctagaataccaagcaatttctctggggctcagatctttgcatatgttacctttattttttgggatgatgtgatggttttaagaaaatggcccccaaaaggagtggcagtgttaggagatgtggctttgttggaggaagtgtgtcactgtggaggtgagctttgagttcccttatgctcaactacttccagtgacacagtttacttcctgctgctgtctgatcaaagtgtagccagcatcatgtcttcctgcacactgccgttctccccaccatgatgataatggattgagcctttgaaccataagccaccaccacaattaaatgttttctttgtaagagatgccatggtcatggtgtctcttcacagcaatagaaaccctaactaagacagaagtgggatattgttgtgataggccagacaatatttttgtttggaataatattgactttggcagtttgggttaggaaagcaatgggatgctttaagaattgcttagtgggccatactagtaggagcatggaagacaccagtgctgagtatcatttgatgaactgtgtgtgtgtgtgtgtgtgtgggttacctcaagagattccagaggagaagaattttaatgtcacctagagatcttcttgtgatattttggtgaagaatgtagttgccttttgtccttgttcagagtctgcctgaggctaatgtgaagagttttggattaattctgttggcagaggaagtctcaaagcagcctggtatagactctgttgtacggcttttagtggtaactctaatgaaaatttataacaaaaaggagcaagctgagcaaataaaaatgctaaatttacagactgagaaaagaagcaccaggaagtggaatagagctaaatcctatgttcagggaaataaatagattaagaaatggaataaagggaatggtgacctcagggcaagatctcacccagctaagtttccaacttgtgaaaaggaactaaagaaaaactatatctgggtgtggtggtccatgcctttaatcctagtacatggaaggtagaggctgggggatttctgagtttgaggccagcctagtctagagaacaagtttcataacagccaagcttaggcagtgaaggacagaaagttggtgaagatgtaattgaacaagggattcatgctccagccccagtaggaagcagaatttggtggctttgaccacatggttctggagtcaaagatagaagaaagggctatgaaatttgcccctcagactaaggaaagctgctgaggccagacatgtttcaggggtgtccctgaatggaggcctagtagagccattgtgtggagctatgaagttgaagcctggattgccttagagaactcaagatgctagagctaccagtgtcatgggatgccttcggaagaaagctgctaacaggtagtagaaacagcccaagagaaaaaagtgtgttgcagtcagcaaagctgaataaagttggagatctacacagtgcttttaccatcagacatggaaatgcagagtttggagtttgcccagcttgctttcgctcttgctttggttcagtattttctcactatgctcgtattccctatgttttgtagtggtaatatatatcttgtgccattatatgttggaagtatatgatctactttttgattttgctttttacaggtgattatagttaagagatcacccaaagagactttgaactttagacttttaaattagtttgggactatgatagactatggggatttttggattggactaaatgcattctgtgttatgatagtgctacaaacttgttgggccagagagtggaatgtggtggtttgaaaggaaatgacccccaaaagaaatggcactattagaaggtatggccttcttggaggaagtgtgcaactctggggccaggctttgagttctcatatgctcaagctactctcagtgacacagttcacttcctattgccttctgatcaagatgtagccagcaccatgtctgcctgcatgctgccatgctccctgccaagatgataatggactgaacctctaacctgtagggcaccacctcaattgaatgttttcctttataagaattgccttggtcatggtgtctcttcacagcaatagaaaacctgaaccaaattcttttctattttctttcgaaaactccccatttttcaatatatatacctctcctgatagtttctttgactcttgccaaagacaagttcatcttgacttctataacaagcaatgtaccaacaagttcagttatcaaagagacatatgaatttgtctgttagattcccctcttcctaggtgatgtggtccatggggaggcctggaaatctagtccaatgatgtctatagataatctattcattgccagatccagtactatggtctgtctttttagagtctcttcagacaagaagagttaggttctgagagcctactgagagttgatcccaggaagtacaaacaaacaaacaaacaaacaagaaaatgagttgaagaagggtatattgactactggatttctggggctgattccaggggctcagcccagctgaggagcctttggaagcatgctggcctaatgtctttgaagtttcccagtagctcacagggagactcagacatttatttattcaaagacattgactgaatgttgtcctaggcaatatttccctacttttgcttccttattaaattgctggctcttatggtaccacatatatagaccacatatatggtaccacatatataggtgtatagaaatatatataccatatatatatatttatttttgaattttaaatatatatatatatatatagtatatatatgtttctgttaaatagcacatttgtgttcataaatagggatattcacaggtcattgtgtttttagttttttatatttatttgttttatgtgtctgagtgttttgcatgaatgtagtacatgtatgactggactgtctgtatgtatggtctgtcacaggccataagagggcatcatatgccctggaattagcgttatggatggttgtgaaactaccatgtggatgttgggaactgaacccaagcacacacacatgcatgtgtgtatgaaaattttaaaagctcacatacacatacactgctgcttcttagataatcaggattgaaaatttaaaaaaattatacctataaataatacgaaacaggtaaattttgtgctttaacctctggcctcctttctctttgtctaggggcatgtgctaccaaaaattattaagtatccattcagaacaagcatctaaatagtatgttgttgatatgtcttttctattcaactcaaagggatcaaattttacacatgtcataaccctgggttgttctttcctttccgaaatctgccagaactgtgcagtccataatttcatcaccttcagatctctgtcagagtattaccgcctcaaagagaccagccctatccactctctctttttatttttatttttattttgtttttggttttccgagacagggtttctctgtggctttggagactgtcctggaactagctcttgtagatcaggctggtctcgaactcacagagatctgcctgcctctgcctcctgagtgctgggattaaaagcatgtaccaccaccgcccggccttttttctgttttttttttaaacaattttatttcacacaccaatttcaggaccctctcccttctgccctcccattcccccatccactcctcagacagggtgaggcctcatatgggggttcatcaaagcctgtcccatcatttggggaaagactgaggccctgccccgagtacctaggctgagcaatgtatccttctatatggaatgggctctcaaaagccagttcatgcactagggataaatactggttccactgccagaggccccatagactgcccaagtcccccaactgacacccaggtttaggaggccctggttcagccttacataggttccccagctgtcagactggggtcagtgagctccaacttgctcagatcagctgtttctgtaggcttccccagcatgaccgtgacatctttgctcttcactccttcctctctacaattggattccaggagttcagttcagtgtttagctgtgggtgtctgcttctgtttcctcagctactggatgaaggctctatgatggcatttaaggtggtcatcaatctcattataggggaaaggcatttaaggcagcctctccactattgcttagattcttagttggggtcatccttgtggattcctgggaatttccctaattctaggtttctcgttaaccccacaatggctccctctatcaaggacattcaaattttaaatgaatgattataatgaatacaggtaaaaacatgtttttcatttgctttcgtgattaaacattttacattttataggtgaaaaacaaattacccaaggacccacatacattcagacccaaacaacttattatagattaactgtataggcaagcatgctagtcttctcagtcaggtcttttactggcaggttgcattttgcagttacaaggaaaggggcaattactttattacttatcttaaaaggtaatcttataaggaatcttaaaggaattacaaacctagacttttatacatgaaaaagaaccagtcagctctactttaaatctctagggtacatatccattctttaatttttttttctatcaggagattgagggcagaagtgggcataaggaattaatcatcacctttggccatcaaccaatcccagcaagaaagttatgtcagccaatgataactggggtactttgttcctgtttcctgaccttaactagttctgcattcaactatgtgcctttctaaaacttttgatcggcttcttttttttttttttttttttttggcctcaaatctgtttaaacaaaataacttagtctaaactttttattttcacaaactttgtttcagctgtatgtagttttttttttttttttgggttgtttttttttttttctttttttttttttttttttttttttctccaaaacctttgaatgtgtctccctacattaaggttaaaaggatttaaactagttgggcttttgggactcaatttttaatcattaacttaagccacaatctatgcagcttctagggtaaaactcacaggccctggccattttgtatttccttgtatttatttttattcatcaaaactctgtataagctatcattattattatcaactagatggcagagattagggaagaatcatcttcttgacaattcacagattaaaaacacctagtagaatgggattctgcatgagataaacacactatatacaggcagtggggatctccccacacccctagcagcaacaatctgtagaggcacagcagaagcaaaagacatcctggggtctgtagtcctatggccttgcctaaatgagatttacccatcagagagttgcctcctggtgggcagtcaccttgaacttcaattgccaactgctgcttcgctgacctggccactggcagcaattctcatatcccagccttcagaattacaattacacgcttatgattatatggtctcaggtttatgttactatgccagctcctagttgtgctaagcaacttctgggttggctctagattttcccagcatgtacaggacttcagtgaatattctttttttttttcttttgtgcatttatctttacttgcaagtgttcatttcaaagagtcactggtctggttcgaggcctctggtttttgctgcaccatagatactgggctctcactggggctcctctttgatattctgttgttgccctgtgtcgtggagatccttcagctttggattctgcaggactggcctcttcatgtgctccagcagattctagatggggtggatgttggggtgggccaactcataaccctgcttctgggcttgggtagttgcagagctggttaacctgccagatctcccctgtcctcaccaccatggtaagtagggctatgcttcctccatggtgcttggggtgggttgacctgagcatgcgtgtgggtttccttggcatactcagactgtaatggcgttacatagggtcatgctttctcttccatgccagaggcagactgcctggcatgtgtgtggatctccttgtcctgctcagtctgtaatccagcgaatattcttatacacacatatcttcgtgtaattctgtaagtatcttcaaaaagaaatctctgatagtggaatggctagatggaagattttttttttctacaagagtttgtgctccactgacatttttgtgttctcaccacccatgcatggaagttctccatatcttggatgtttgcctatcctatattaagaattgcttagggatttttaaaatcatgactgagactaaaattaactctcatgtagattatatttcttttgtgtgtgtgtgtgaattgcctgctcagacatttttatttttctatttgtttctttttggtggctataattagttcctagaattttgttatttcctctaaagcacaatgaagaaagattttaaagaaatcctcactctcattggtgatgatgatggtgatgatgatgatggtgacagtaacaacagcagcaacagaaaataactttatgccgtgaaccgtttatttctggacatttctaattgttttttcagttttctaatagtgatttcatatctaggttgaaaaccttaagatacctttgtagtcagagtcataatcacccataaatatttgatcagtctcaggagtgaaaaacaaaacagaatgtgcagttttgtgtgtaagggaagcctcctaacatggtgtgttgacagagccaccattaattgtcagatttgttcgggagtgcctgttatttctcaatggtcaaacttaaagtatgaaaacatctctgttgtcattatactgaacaacagagacctcttcttaactgaaaattgtgtcttcttcagagaactttgggagacagtagtcaaccttgcaggtcttcatggatgcttcaactctttcataagtgacgcactttggaagtactttaactgaaatatgatttataccatgattttgaaatattttggcttttttcccctgagaatcactacagcaataagaatttagtccttattttttacctctgcatctttcacaatttacctctgatggaaatgaccaagtatcacaacttctgtaattaagtttcctaaatggggtttatttcttgaagagatcattatgcactaactagaaatatacactttaagtttagcatggctttacatggagatttaagggcagttgagtaaggattaacttttaatccttaatcctatatttttatggttataaaactaacattagaaggaattaaaataatttttattgtaaattttcaaactctgaaaatttgcttagtccataacccacttttaggttatcaagctttaaaaaatagcaatgatatcacgtttatacattttccacctcatatttcaatttatattatttatatatataatattatatatatacatatatatatgtatatatataaattagctagtgtttaatgtccaaggagctctcttgttcttaaagaatcaataacaacccccctcaacatgctactctagtagacttgagttggatacttactggtttccaattcaggttattttcctatatatagattacatgaggtcattattattaaattatgtattacagactctttagctcccatcaattacccacttctaaaataagaaatttgtttttgtatatttttgtatattttgtatatttactgatgacatatagcttccccagcaagtcctctcttcccagctttcacaaaactctcctgtgttctcttgatgctgatggtttttttgcctgttaatgcctttcactttctccatggtgttctgtaggcccagggagggcttcatctctgaggaatgcttcttctctgttctacccctgcagagctactgcacagatcctattcagtccatattggtaaattaatgtggatggtgtggatggatatgttctcttcattaagctgggtcaggtgaagctgtggtttatgggtaagggaactacaagaagagatcaaaagattttctgctgggaagacaaactttaatgttttccatttagccctgcttcctggctgactgccagttgggggtctggagagtcaattttcaccacacaaatgggaccattcctttgttctttggcaaagacatgtataattctaatcaatacaggcacagaaggggtaatgcaagatggttacggataaaaagagtcattataaggttggcaaactgctcccttttataaaagaggaaacaagacttgcttggtcagtcaaggaattaaaatgcttaaaaatcgttgggcattggtggcacacgcctttaatcccagcactcaggaggcagaggcaggtggatctctgtgagtttgaggccagcctggtctccagagcgagtgccaagataagctccaaagctacacagagaaaccctgtctcgaacctccccccccccaaataatgcttaaaaatctggaggtgagggtttgagcaagccataccacttggacatgtaggtagatgacagatgggccatcatcatattttacaaacttgtctaatatcgccttattcatagtaccataggtttaatttgctagttatgctcagtttctatgaacttccattctagagactaggagagagcctggtttcctatgcatgttagggacttgatttcaggaattttttgaattatggctagtacccttctaacccattcctgctgttcagtggagtcactcagaggacaggttgaaagccttgtgatttctttaattatagaagagttcctacatttttcttatgatcatagacagaaaaaaactagttcaataatttcttatcttttcttgagatcatggctatttgcaaaaatatattaaaaagactttgatggattattttgtagaactacacagtgttctcttatattgacattactttatatttcttaaccaactttaacatttggtcatttaggtggtttctgatttgttatatatagttataatatttcttcaggataaacttctagaaatcaaattaataattacagggtagaaaagtttgaaagtaattaatgaatggtttcaaattgagaaagcagtcttctggtcagccaagttatcgtgaaagactgttatttctaaaagcttggatagctatcttaaagatacctttaaaagttaagcatagagttactagtcatacaatatgtatatttgcttggttgacatctggcttcactttagttacaacaaataagcttttcccaaatgattctgaagctacactataaactgaaaatcaaatttccttgaataagatttatgggtaacacagatgagtgagtctgctatttactgtttttgccttatgtgtggaccttctgatagaaccttctctttctgtaacattcggaagaaattggtcgctttttgacatgtgtagatgatggtggcaatgacagtaatatagaggcatgcatatgtgttatgtggtaaggatgtagctagagagttataaccttttcttacctgtttatatatttaaccactggcctcttgaatacatttccatgatcatttcaatttcctattactgaactgaaagcgtaggttgagctatgtgctctggcagcctttgtaagttgacctttgaccaaagtttgtactcccaagaattctcagtcttttttaaaagaagtatttgttttatttgcctctagaattgtaaattgggatgcttgagaatctttttaaagacatctcacattcttaacactagatggagtgttagagttgccatactaactgaagtagtaggatagagctcaaagcagatgcaagaacttaccactgtgattttaaactacattccttttacaaccgcttgcttccaattctattgtaagagtagtcttgcttgtaaataaaatagtgtagaaaagaagtagcacagaagtagccattgctacttggggtagatttttttaagacatgttagtgaacattcataaacatttacagctaggtagatacagatttttgaaaaaataccaaataattatatatatatatatatatatatatatatatgtgtgtgtgtgtgtgtgtgtgtgtgtgtgtgtgtgtttcttttttgcaaaatatatattttatccaacaaatcatacacatttttacgatactaaatgtacaattttatacaaaatagatttacccaatgagttatttaacttattattgcaacttcagtttgtctttcaattgtgctgctacaaacagtattgaaattatcataatcaatatcaatactttttatattttttcaattatttatttaatttttagaaagccaaatgtacaattatttgaaatgtgaacactttcacttctagattggctggagaattattgaactagtttttttttttttttgtcgctgcatagattacacaagcagtcaattaccctaacacttaaaccaatattgaatgttctcatttgagtgtgttttagtatgagaaatgaaaatttaatattgcattgttttatcttgtggtgttttgtatttataattatgaatgaggttactcattttttcttttagcatttattctgtatttctgagccatatgtttgagtgccctgttgatcactcccttgtgatagttatcagaggtcctgttgtgttcaagacattaatccttcatgtctttcatgttgtaaaatatttttattgttagttgtggattactatttgctattttgtttgcatgcgccctgtgtcttagacttcccaggctctaaaatctagagaaatggatttttaggaggtacctaatctttattctgctccaatagcccaaatggaccaaggcattcctcaatgggaaattgtatcatttctgcagccctgtctctaattatacagccagtggtgatttcgtaaacatttggtcatccacctacccatccatccatgtatccttccatccaaaacatattcttcaatattctgtgggcacccagctctggagatacaatagtaaatagacagatatgaccctagcctatataaataaatgcatcgaggaggaagtatatgcaaacataataataaaatatttcttacagctgttcaaaagacactactgtgggcctatggagatgcatagcaaaggatcctggcagagacagcaattaggaaatctaagtcctgaccattgggtagaagctctctggaagcagatatgatggagagtctttcagcccaaggatgggttccttgaaagcagttgtagcaagaaggatcttgcaaactcaagactttgaaaggaggccaatgtacatacaacaaagaaacattatgcaaaatagaggtaaggtggacagtgttgggttaggcacacggagctacatgaaatgtccttctagggcactaggagggttagagaacctagatcattgtaatggaaagccattggaagggcagacttttgtaaaccttactgttactgtagtattggggatggattaaaaagaagcaaaattagacaaggggtagtgtgtagactgtggcagtgaactgggagagtaataattttagtgtgaagtagggttttagctgtaagaatagaaaaaaatggccttaagatatgctgagaaaatgagattgatgcagtaagaaggtagtttgaaaatgactgggagtagaatatatgtcaacaagattatgacttttgcaactgaatggactttacccagaactcaaaggggagatctatgcatagtgattatgtttaaataccattggtccatgcctgcaaaaaaatcaaacccaggaactgcagcaatggacaccatagagattatacagaggaaatcatttggaaaaaagcacaatgcctggcctcagcctcctggaaactggatttaatgcctggtcagagggacatgaacttgaaaaagagcacctggagcagccacagaggtggtgggatattggaaagctgtagtaacccagttccatgggtaaccacaccctacttgctgtgaccccataaccctatcatagctactggtcaaggactaggcattcactctgagtacagctgtcctgcaggctaatgagaagcacatgaggcttgctgacacaaatattcttcccagcacaagctctccagtggatgtgtgtgtgtgtgcgtgtagtaataaattggattttcagcttcagagatgttgaataccatacctacagaagagagtccttagaaaggagagccatcccctgcctgagatacctcctgccccagggtgaaaagagagggaaagacaccccaagtccctgctgctcaggcttggggaggaggggagtacagagttattttgcgttctaaacaagatttcattctctaaatgatgtttccctcctgtgtaaagccaagctgcatggctgtttataagtttgtataaacacagttccttgatgatcagtctcaccgttcctatttgggcatttgttctcccagaaaactggctgccgtggcaacctgagcatcttgaagcttaagctgctggcttgctctctgtgtttgggtcttcccaagagcttttgttttcccaagcttgtttcacatggatttcatcctctccgtctctaccacccccttctgattgtgtccacatgtattgtgttgattcttttatgtacgaactcaagtaaaactcagaaaccgtgacccactagctctggagtcattttacatttaaaggaacatggcccattgagattctatctctttaaaataggacccagacactttgtacacatccactcttatcagaccccaaccctcttgaattccctagcaagtctgagcctgggacagatcccacctaatctcaacaggcagtagtaacaccagagtataaccagaagggctagtgatcaaacggcaaacccttgtacccgttgtctcatcctaatcattagctgtcttcttccactcaaagatgcctaagtttggatggcatctagtttaatctttcttcctgatcccaggattctccatcgacttttgccctgtgtcaattcctaatctaaatgttctacttttatgatgtgtgctgctcccacatcacattcaagtcctataaagaggaccattctctgatagtgtatcttgtaggaattcacttcattgcctttgttctcatttgacatcaggggaaaggggaggaaagctgtgagcccccacatggtaataattttatctcctcatgtgcctgtaacctccaaattgttatctttgttgtggcaaaagtcagtagattattgcttttcttagagagtagccctttgctcagttcctagaacatggcctctcattatttcctagatttactgcatacatgctcacatggctgtgtatgagagtgaaggttgtagagtcagactacctagtgtgaagtctgctctcattgcttgcacactttgtgttcttggcccaaaccctaaacccaggggtcctcatcatcaaaaatactgcatcataagagaattatgccactgatgtgtgaagcagcaatatggagtggttatagcatgatctttttcagagccctttgtttctcatgtgtgaagtgttttttaaaaccatcttcagggactggagagatgactcacagtggataagagcactggcttgcagaggacgcaggtcaattcccagcatccatatgacagcttgtaaccttctatacctccaaatccagggtatgcaacacctttttctggcctctgaatggaacacagacatgcatgcaggcaaaatacccacaaaataccatgatttttaaaatattaacatatcactgctgacactttctttgtttagtgcctcccttgctgctttcctataagacttgagcacatgctcaaaaatcttaaaacttggtaataaagcatcagatcaagaaatattgccatgattagaaatttgctactagtaaatatacatattttctgttctttacttagtgtttggtttaatcttttgggttattttttatttttaaaagcattcttatcttaaataccaatccaggttccctctttttcccatccttctactccccctaccctctccccatcccacccccatccactcctcagagagggtaaggcctaccagggacaatcatcaaagtctgtcacattatttggggcaggaccaaggcccttccccctgtatctaggctgagcaacgtatccctccataggaaatgggctccaaaaagctagttcatgcactaggtataaatactggttacagtgcctggccctataggctgcccaagccccgcaaatgtcacccatgttcaggggtactaattcggtcttatgcaggttccccagctgtcaatctagagtccattagctcctacttggtcaggccagctgtttctgtgggtttccacaacatggtcttgacccctttgttcatcattcctccctctctacaactagattacagaagtttggctcagtggttagctgtttctatcagcaactggatgaaagttttttgatgtcatttaaggtagtcatcaatctcattataggggaaggatatttaaggtagcctctccactattgcttagattcttagttggggtcatccttgtggattcttcgagatttccctagtgccaggtttttgttaaccccagaatggctccctctatcaaggtatctctttccttgcactccttctctgtctttcccccaactcgaccttcctgatccccccatgttattctcccctgccttctcctttcctctctctcctgcctccctccccttccatttgtgctcccaaattgctcaggagatcttgtccctttacccttcttgggggtcacatatgtctctcttagggtcttccttctctcctggcttttctggggttgtggattatggactcattatcctttgctctatgtctaatatccacttatgagtgagtacataccatgtttgtctttctgtgtctgggttattccatttgcctgtaaatttcaagatagcattttttccattgagtagcaccccattatataagtgtactgcattttgtttaaccattctttagttgaggggcatctagggtgtttccaagttctgtctgctacaaataatgctgctacaaacatagctgaacagatgcccttgtgttatgaatgttcatcatttgattatatgcccaacagtggaatttctgggtcttgcggtagattgattcccaattttctgagaaaccaccatattgatttccaaagtggctgtacaagtttgatcttagtcattctgacaggtggtttatgtatatgagtgttttgcctgcatgtgtgcatgtacctgttgcccatggagtcagaacaagagcaggtgaccacttgataagtaaaaatttagtgaagtctttgaggatgattattctatcatttaccatttattataacattttaaaatttttgggtgatgatagtagagaaaaatagaaaaatgtcttgtctatttgacgtcatctaacaattagacttgttagatgtgctgatagatgttatctatcttgttagatgtgctgaacttgttagatgtgtgaaccttcaaatcccatttcttgaaaagctgaagttggactatcatgtgttccaggccaccatgggctacaaagtgaattaaaagtcatcttggtttacacagggagaccttatcttaacacacacacacacacacacacacacacacacacacacacacacacagagagagagagagagagagagagagagagagacagagagagagacagagagagagagagagacagagagacagagacagagacagagacagagagacagagagagagacagagagagacagagagagagcctcagagtttctctttgaaagtaaagtttggcatcacaggatggaaccatgagtcctgtctgtgttccatgctcaggacttcagcagctttcagagttggctcattatcagacttctctgattttgtgctaagggaatcctattttaaaagtcagtctttgtatagtttgttagtccatagagactgcagttgtcataaaacatctgagtggaaaagttgtatcagaggaaaacatgagcagcttcctcataaaacttgcctgcctcacactagtccaaagacctggcatcagttgctgtcagtgtttgtttcttctctaggagaaaaaagaaagtaaaatacaaaaaagacaagccattggccttggagcacacacacacagacacacacacacacacacacacacaagcactggagtgtgtgtgtgagagtatgtgtgtgcattccaaggctaatatatttatatttgttgaatttcagataaccatcattttctttaaaaaacttaataataaattatttgttttgtttcaatgaaaaaatttcccacattctactagtgagctacttaaaagatgaatgttgaattcaagtaaatacttagagtattttatttcccacatatttcttcagttagcataattaatatactgcttattatcacagatgatgttatgctgacatcatcactgaacatagcatgacctataatgtttgcatatgatcgatttatagcactgaccccactttattacagtgcttttcacaaagccctttaatagactggttctctgtttaatatcttattagttagttttctgtggctgtgataaaagcactacaagaaagcaacttaaaggagagtctattttggcttagggttttagagggagagtccataatggtaggggaggtgtggcaacaatggtccagagtaggaagctgagaactcacattaccctgcaaacaagaaacctacagtaaactgtgaatggggaggggcagtaaagtcagcaacccaccacagtgggttgcaactaacttgagaccaaatattcaaatacccaagcctatgggggacattttattcaaactaccccaacctgttaattaaagtcttaaatataactgtctggagatccccaaggaagaggattttggccaagagaagaggatggagtcaaccttaagagtctggatggggttatccccatttttcctacatcttgacaagattctttgtcaaactacctctgtttagtatcttctctcatagcctgcaggaaggtaggtgtgcagcaattgaagccacacttggtaaaagaagtttccattcttcacagatgtctcatttgtgtagaatgtgggctttggggatcatatctgagattattgcccagtttctttaacttcagtattgtgaacctggcgaacctgataagctgatgacaagttagttagacatcaggttagacatcaggttgacttataatttatgaagttgaaaagttaatattaaatatacacatatccattcacagatggaatagatatcacagatgaactaaaggcaaaaaaagacaaaaatcatcatgacttaagtgtctgttacctttatccttttgaagatgtttcaaatgttaatgatgtactctccatatctccatcttcagctccttctctttcatctgtctccctgtgtgcaagtgtgtgtgtggcatatttctaatttgtgacttttctccttttatttgtctcttattcactgatcaacttactatagtttgaccaaaaaattaataacttgctatctgtgttatatgtgttttatttttattattttctacattaatatagattgatttttctatagtatttgccggtcctgctttttagtctttctagagttttatgtgaatcttacctgtcttgctcttgtctctgtctttccttcctatgccaccattcatgatctgaatttgtcttgtgttccaacttctgtgatttcacacttactcctcttccttctctctgcttatgctttccctgaattttcaccattaagcccactcaggggacatctgttttcctggtggctctcaagtctttctcaatttccttgtaagatctggtcctatgcttctcttcatctcctcagacacatcaaccttaggcttagccacaggctttgcaaagttagtatgtaaaaataaatgtcattcctatgccttatgcaaatgtattcatcttccagtgtctctatttatcaatttcaaatcaagataatctaccaatactatcccaaattctatatgtgttagagactatttttgacttacccagaaccattcctggctattttttttccctcagtgagagtggtttgattttatttggagcatctatgtgtcaaattggagaagaggttgtggactgattttttttcagatttttttgtttgaattagaaacaagattgttttacatgacaatcccagttccttctccctcccgtcttcccctcccaccccaccaactaaaaccctatcacataccctttcttctattcttcccctgactcaacctttctgctccctcatgacctctgcatccttcctcttcttcccttctcatagctccctcccccctcttcccatgctctcaatttgatcagggattcttgaccctttccccttctccaggggaccatgtatgtctctgttaggctcctccttgtttactagtttctctggcagtgtggattgtaggctagtaatcctttactctatgtctaaaatccacatatgagtgagtacatatcatgtttgtctttttgtgattgggttacctctctcagaatggtttcttctagttccatccttcctgccaatttcaagattccattgttttttccgctgagtagtactccattgtgtaaatgtaccaaattttctctatccattctttagttgaggggcatctaggctgcttccagtttctggctattacaaatagtgctgctatgaacgtcattgaacagatggtggactgattatttaaatgttggcaatactatttattttattagatactaacttatccattttctgtcccgacaagtggccatttgacttattttgggcccatagagagtaatgcaaagttattttgtgtcctcttgggtgggtgggtcaagggggttcttctgtggtgctattggaagcaaactttttgtcttagttcccttttcttctctgtaatgtgagaaactgatgcttgaagtgtgcagctaattactgctgtggaaaaaatgtcttaggatgaaagacaacatggtgtgatggtgtagcaatctctgggtatgaagtccacttcatacaaggagcagatgaactccagaaggctgctggaaggacaagagtatccagatgaaagagaaagatgccaaaggatctgtcatgttctaccaaattgcctctaaacaatacatttatctggatagatcagtactacagccagctgttgtcagagaaactcctttttgcagtgggtagcagtaactatagagattgataactggtgaaagtgctaagaataagttactgtttaatccctagccatgagtgagaagtctctgacaacaccccaaaaactcataaaaccttgtggaaagtgggcaggaaaaatgtaagagctggagggtggagttctgttgaatgctatcttccagggatgacatgaccattgtattctcatgctcacagaaattgtcattattttttgaagacctgcataagactgtgtccatcaataccctatcacggaggaagcagggaccctcatggacccacctcactgagtatctgtaggcagttaatggtttctgggggagggagtgattttaattggtaagtcacccatgactacataaagaaactctcacctatgctcctgtaagcaactctgataaaattcactggatactcaaggaaaaaaaatggtctcggaatagcagaggaaatatttgggaagaaaaggaggtacactggaagtgggaagtgtagtttgaggtttttgggtttttttttttcctgtctcatctggtgccactggattggtttctttcccacccactggatcaccacagccacttatgaaataatcactcagaggctgatctatcaaatacaattgtttggacaatggctcagatatattactggctatctctctcttataaatcaatccatttacattaatctatatatttccacaaggctgtgacttaccagtgatgctccaacatgttacccctttggaggctacatggcatctccctgagtccacctactttttctctgtatttttgtttggatttcctgcctagctgtatttttcctggccattggtcaaaacagcttaattcatcaaccaataaaacaacacatattcacagcatacagaaggacatcctacatttccccttttctgtctacttttaaaagggacattttaattttaacatagtaaaattacacataacaaagcagttatcaagcgataattacagttacaatatttagtctatttgtattttatcaaccaataaaaacaacatgtatttgcagcgtacagaaggacatctcataccagtgaagggaatgaggaaaggtaattggcaatgtttctctttttaaacttaactagtgtttccaacacatacaattggaaatctttcctttactttaaatctcaagaggactcaaagaaaaccatagaaaagaagagaaatgaggagcagaaactatatggcctgaattagaatgcattgagattgtgattagggtgataatgatttggtaatgggagatgaacttcaaagcagcctttgagactcattaagttgtgggccacactgggttgggaggattaagactgggtcagctgaaccttttacctattattgtcaagcaagtagtgaggacaactatgttggctgaatcggcatttctcagcccatctggatgtgattgacagaaacaacagacacagttaatgctgtgagcatgacatacaatttcaagatccataaaatataggccaaattgcattaatatacttggatagtgtataccactcttcttaagccctcagacctcctggcaaccacagtcactgggctggtgacaagatatgtcttttagtttaggaccccagctttggaacataggaagcaagacctgcttatctttcattctccattcatgactcctccttgcaatatcaagctgcaaaaatcatgaactacttgagtctcctgttaccctttgcctagttctaggtgcctgaaattcccactctacctctctaggctttcaagtccatgtgactaacttcttctactcaatcattctctctctctctctctctctctctctctctctctctctctctctctctctcctagagccatgtactgacaactaccttgctggtgtctttggagcattagttattcaggcagtgaaagaagatatagatttaattatcttggccacaggatatctattcatgttgtgcgactcattgagttattcaagactttgtttcatgatgagcttcctaaacagctactgtaactctccatcctcctaggaatcaaccagggcctggctagggaacagatatcaccccagtttttgtagtgtacttcttctccctcctcatagcctctatgcatgagacattgatccctctaggtctaatgttctcctagtcccccacgatgaatagacaatacttctaaaggtcaagaaaaccaccagttccttacattcaggcccactcagagtctcaggatctagtggttctctgagacttttggaaacactttctgtagaaatttaacccacgtctaacatctatttatttagtgtttagagacaggatctttctagatagccttggctaggctggaactccaagatccacctgcctctaatctcctaacctttctatcaggaacccctactttttgataattggtagaaagtatagagacacaaaatagaagagatatgtgtgtgtgtgtgtgtgtgtgtgtgtgtgtgtgtgtgtgtgtgtgtgtgtgtgtgtgttggggtgaaaggcacagtatgctagaagaagatggcacaaaaaagagagatgcttaaatatttacttaggtcaagcatacatgagaaactttaaaaattcattattgtgcagcacaatcaatggggaccttttgaattttgaatataaatccagtattgtgcaaaggacagggaagaaagcagaaacagcaggcatgtgcttcttaaagaatgtgtgcttttgaaaattaaacctatacatgcaaagtaatcaaaagaactccaagcaccctgagaataaggattgtctgaggccttgagagcccccactttcctgactcatttctgccttgctgtgagagatagaaaagaaacgctctaactctgcaggtcaggcctggtatcacctcttcctgtactaatgagaatgacgttccaaccattcattttaagtattaacaactgtaaatataattaagcctattgagaaatattacatgacaagaggcagatttttcttcctcttcgtccctgagctgtaaaattaagagaaccgtagccctgtcattaaagaaaggctttcaaggacttctgagagtctgagggcatcgtcctagtctgctttttaattccccctaagttgagaaggctgctctcagtggattcactaactggcatgagctaaagagagatccaagcctctctggggagctaagtaattacccttgttattctgactccagtcatcggttttgcacctttgtgcagacaacaaattaacgtgcaaatgctccaggtcccaaactggaaatgtctccaggaggaatagtttgaatggagaagacagactttgcatttttaatgacccactttggattcctagaaatgcgagtcataaaattattgtgtgatgtcacttcagcacgaggactggggcagagcaccgcattctagtttagccattctgccgtataaatgtgtgcccacacatagtcacactgcaaaccttactgcactccatgctgagctactactccctaagatcttcccgacattcagttttaccacatgaatcacctctaagtgaatgacaatacacactcacataaaaatttgagtattggctcttttttttctcattttcagacaattttataataccatgtttcttaaagccatccacttctctccagcatcactggcatgaccctcattaagttcttggtggcggaacaaaaggctccaccaaggtgtcaagtctcggcaggttgatgaatctcatccattctttatagcagaggtttcttaaacacaatgtggattaatagccttttaatggatactctaaaagtacattaaaatatacttaaaattggttgaagacatccttgattttgacagacctacagagccatctccatgcccaggacagagaacaattaaaatcatcttctagtcttctcacactgctgcttggccagccctgatcctgggctaccacttagttatagctttgcttttggagttttgcctgcatgccaaagttgtgtaagtggagtaaggcagtggtggcatttttactcctatgtatttcaataattataatgtatgatattcattcacattgctgagtgagtcagtgtggcccattcctttttattacttgagtaatagtccactttatatatctatccattgacctactgatgaacatttgagttgttccaggcatggctgattagaaatactgccacaccataaacacatgaaaacttgtttttgttagtgtgcattcttgtatctgtaggatgaataactaagagtggcaccagtgaatcatatggtaagtatctgtgattgtcaaattcttataaatacggctttccattccatcactaatgtaagtatgggttccatttgacccacatcttaaccatcattcagtattgttcggttaggttttagttgtgggtcattcacttcatatgatattttgtaatttaagccaagcaatgttcagccaactctcagaacatctcatattagataacacgaggataagaaagctagaaaacaaaaagtatttatacacgtagagacattgcatatgtgtacccacaaacatatccatagtaaaataaaggtgagatacatatgaaactaacattctttatccctgcaattggttgtagctgttgttttcataataactacattctcttgttatacattccatattacatttgcttgtaccatgcttgtggttctaatccaaacagaggtgtaatttacctgaggagggtgtgagctgtgcctgttccacattgattttagtcaagtgatacactacaaggaagaaacaccctatctatagaccctcttatattccatatagactcttccttgcctatgttgtatagtagaagtctaatttccccttggtaattaggaattaccccagtcagcacagtaactttctcctgtttctgttgatctagaaacatgaagaatccacagcgactagttatgataaatgacttgctttcccccctttatttctcttcctctttttctatttctcttcaccccaaatccctctatcttatggtattattctccctaagatgtcccaaaactccatgtgtatggcaagctggccttaatctcataattcttctgcaccagcctcttcagtgctggtgtcattagtatcctttcctggggtttctcctcacttctgtggaaaacatgtaccaagatgcaccttttttttgtttgtactttcaaggcaggatctcaccatgtagttctagttgtcctggaatgtactctatagaccaggctgacttcaaactcacagagatccacctgcctctgccttatgagtactggtattaaagacttgtgccaccatgcctgatttcaagatgcaatctttaactaccctcataaatctggggttaaaacttcggttcaactttggcttaactgtcacacatcctcactttgaacaatcaaacctcaatagcaaaacaagtcctgccttaccaacacagtgagagtggggacaggaagctactgtagtagcagagagagtgtgatgggcatgggtgcttgtcatctatagaagaggctagtgcagacagatggacagctgtccaggacagaaaccaatcaggtgatgtttgaaaatgttgagtgtacgatttgggttttaatcatcaaagcattatataaatgagaaaatgtactcagaatgccttcacagctgccctacgtattattacagcctgccctgactctgctgtctcaagagtatgactttgctgaaacactggctgatgtcctacctcatctgctgtacatggtagttgggagtgtttgatgaggttaaataagaaacagtgccagactgatgtaagcctaggacagcacttgctcagttgtgggtccaccctctgacctcccttctgtgctctacacatgtgcatctaaaaactctcattggttgggtctgtgaggatgctgcaaggacatcttggaagcaatgtatataaaactgatcctgtttcccagtcttcccctcgtggcagctcatctacacataaatccagtgtaattcagggagctagcccaatgtctccctgtgtcattcttctcatgcccacattgtcatctgttcctgttgattcattttcccacttggttctcaactctatgcaatcgctatgtattttctgtagtactgtaattgtctctttttatgctgccattctgtttccttgtcccttcttaacccatcctcaaaggatcagtcagagtaatcactgccaaactcctggatttcttctttaggtagcaggatttctgagaagtccatctgtagctatgccaataaacaaatgctttgctcctttgcccaattagaatcatcccggagcttcaccaatcttgatttttttttctgttcaattagattaaatgtattccttttttaggataaggtatgccaggaggcattttgtcaaaataaacatttcttggagaataaaaacagacagtgccttgcattgaattataatctgttgccatctgaatttttctgataagtaggggtttagtttcaaaaacaattaggatgtctataaaagtagaaattgttttatctttcatcaggcagctattaacatagaaccatgagacaatatttgtatatttagatagaatagatatgtagtaattgaatattattttaaacacacaagcttaccaaatacaatgggtatttttagtcttgaagagaatcagggtttggccagtttgtactatactaatgaaaacaaaacaggcaaagcatttactttataattttttttgcatttaaaatcaacatgttaaaatggcactataccgcccccacaagatgcatgtttattacagaaagacaatggtcactctatagtggagaaaccctgcaatcttttgctttaccacatggtcaaagtaatatcattaatgaaactaattgacatcagcggtttcctaatatgatggaccaagacaaacaacattttgattcctgccagaagtataaacctgatcccagtccccaagaaacatcagacaggaccaaattgtctggcctgtgccctttaaaaataccaatgtcatgaaacacaacaatgactaaggaaccgaaccatcccagagtaaaggaaatttaactagatacaacttatggcctggaaacttttattcacttaaaggtcttaattggacagttggaaagcacagaatgaagtttatagcttagataatggcattgcttcaatattaatttcctggtgtattgtgactgtctcaaacagtgtaggtatctttagggaatccaaatatcagagctattatatatccttaaacttcatttcaaatcatgggggataaaaatgcctcagtgtgtgtttatatacattgatatatatacacattgagacaacaaacaaaggcaaataaaacaaaattttaacatttagctaatctgtgtaggagatacacagaaatctttgtatctactactcttataattttacttcaagtgtacatttctgtcaaacaaattaaagaaaaatatactgcctatattatagacttttggaaacatcatctctttaaagagagatttcattatctgcctgagaaatgttctttcttcaaaattctttcttcaatctttctctcctgcccttttgttctcagtctctcctcagtggccaatgagatgtttctctctacccatgcctgaaagaaagggaggggactggctttgctatttatgttgtttagcattaaatgtaaacacacacacacacacacacacacacacacacacacacacagagagagagagagagagagagagagagagagagagagagagagagagagagagagagagacttgtgtgtgttaaacagaatacatcagcaaaataatattgttcagggctgttgcagctgtctctttctctcttctggctccctccctcctctccctcctccctccctccctccctccctccctcctccctccctcttctccatagaaggataattacttaaggaaaggaaaaggactaatgggaggagtcaagcaagggaaggcagtggacaaataaacaaataaacaaagtactatgtatggaaaattaattagatttttctctaatttcttgcaaggtttacagtttgggtttattgatagctgtgcacattacatttttgatttattgaaaacataggctctcaaaaggaagctgtgtattacctacaagtgtttttaaactattctgatttgtagatatttacaaaagccactggttgtgatttttttcttcctggtatgagactgttccagcccaaagatgattttgcttggacctctgtaggaatataatggcactgaatgtgaactgtgtatgttgaaatgctagagggccgggggggggggcgtgggtgggaggggggctggtttatagacactctcacacatgttttctctgcctccctcccactttcaacatgaccttcagttgtcaggcttaactctcctagttttatttggctgttgaacctaattataatgagcgaaaggctctgagacttatcacagatgaggtggtgaggctttttcagaaatgttgccttcaaatagacatttgaggtttaatttatctgtggctcctaacagctgtgtgcactcctcaaaaatttagtcccccatagagattacttatcacagaaaataagatgtttgtgggtataggcacgtgggtgggaactctaaggtttaaattgcataaatatttatgtagagaagaaatactatggtcaagtaaagtgatgtggtattattccatttgtatggtgagagtcaattttttttttatttttgacactattatttccaaggttaagtttcttttcacacatgaggttgaatggtttcaatatattgtcttaaaccatttgcactgatgtttatggctattcttcactttctaagaatttgttaagctgattaaaaatgacagtgaacactggaaaattgtagcttcctctctcatagaacagcttaccttttaaaaaaggagctatattattatttttatgtatgtgcacctcagggtgtatgtatcttacagtgagtgcccacagaggccaaaagagagagttagatgtcatggaattggaactgcaggttattgtgaactctgcaacaaggatgctaggaaccaaactcaggtcctcttcaagaccagtagcactattaatggctgagatgtacttctacaagtttacatagaattaaaacattccatgtgaaaacctggtaactagaagcttttgaagacatatttcctttccatggattatagatgtcagacttcaaatgttgaagatgttgaatggaagaaaagagggggttttttaataagaggaagatgggtgttgaaaaatataaaggaaaatatttatgtaagcaatgagtatattgtggttaaatactctgtgtgcaaaatttgcataagtcatatgaagcaatttcagtgtgatttttaaaaaaaaaaacatactgaactgttttagagcaacttaaggtttacagcaaatatggcagaagatgaaatacacctcactcagagtttctgtaaatccttgtttgcacacatgtaggttttccctttctaaaagatatcctcactggagtagggaatttgatatacttgatagacctaaactgatatatctttatctatcatcaaagcccataattcatgttgggattcagtatttatatattcattcagttacttttgacaaatttatccttttattctcatatggaagagtttcatggctcccagaactcatctgtatatcatttccgatatccctcctgtttaacttccagccatcctgtttttttcctacatttccagaatgtagtggagttggaatcatatagtatgcaatatgtttagattgatgtattttacttcataaggtgtatttcaccttcccccacatggtttttgtgactcagttgctcatcgcttttagtctttaataatatgctattgcctggttgatctatgaattgcttctgctaaaagatacattggttgtttccaagtttaggacaattgtgaaaaaaatctataagcatctgtgtacacatttttgagtatattttattgttcaatacatttgagtaaccatggagacttgtagttattggagtgtatgtaaatatgcttggatgtacacaaataataaaataataaaaacccagagacagacattggggttcaagctgaagatcagaaaagcaaagcagccaaccactagagagttctcacctctacaaaggctcagaccaaagggggtgatcctgtcctcagtgtgactgcagactgactgactcctgtctcctccaatcttacattcctctctagtgcttgtcctgtgccaccactgcctagcctctatggctaactagtgtggctcctgggattaaaggtgtgtgtcaccactgcctggcctgtatggctgactagtgtggctagatttgcactctgatcttcaggcaagctttatttttttagatcataaacaaagtatcaccacatttggctttctgtgactatgcttgatctatccagcttgttctaggatagctaaataatttcatattgccattaacaatgaacaagagcttctcttgctataaagctctgcagctacttgaagttgtcagtgtttggtattttggtcatcttggtagatgtgtaattgtaaatcacatggttattgttgtttaatggttctgggaattgaaggacttgcatatgttaggcaatgttttgccactgagtcaccccctcccagaatgcattgttttattctgaaattccctaatgtcctaggatgttgaaaagcttttatgatgtttgctgtccttgtgtcctttttagttaggtatctgttcagactgttgttcaattttctgtcagattgcttattttcctattgttagttctgaaaggtttgtataagtttcaatgagctgtggtggtacacatctttaatccccgcccttgggaggcagtggcaggaagatctctgtgagttcaaggataacctggtctacataacaagttgtaggtcagccagggctccataatagaaccctgactccaaaaagaggaattttttcttttcttttttctatttgagacagggtttctctgtgattttggaggctgtcccggaactagctcttgtagaccatcctggtctcaaactcacagagatccgcctgcctctgcctccccagtactgggattaaaggcaaaagaggaattttttatatttgtatattattgataatagtcatttaccatatgttttgaatagtccttctagtctgtggctgtcttcttatcctctttttctgaacatatgtttttgattttcaatggaatttagctcatcatttgttttatctattgtatgctaattgtatccaaaaggtcattgcatacccatgacatctagatttttcttcattttgatcatctaggaactctgtagttttacatggttgtgtaatatagttagtccttctgccctcagcctcctaagtgctggctttataggtgtgtgattctgcttttgcagctttcattggaattttgtagttttctttatatactcctttttatattctgttagatctggaattattacattctggaggggattaatataaatggtaacatgcctttactttcagactctacttccccatttcttatatttcaaagaatgattgattttctttttaaattaacctgtatactccaaccttactgtaactggcaaatagcttccattttagatccaaaggtcttgttagcttgagttttcttcctggattactaacaaggacttttgtttcttcttggcaattaatatacttgtaatttccttgtcttattgcagaagccacagcttctcatgtgatgctaagaagactggctaagagggaataactttaccttctccttgatgttaggaatcatcagacttacaatgttagttataaatacttttgtacttgttctttataaaaatgaggatgtatgctattctttactgaggttgtttctttgttttctattttaattaaattaaaacaattctattttacatatcaatcccagtttcctctccctccagacctccctctcccccaccatctcccaaacccacccctatccactccttggggagggtgaatgtactttttgaagcaagtggttgctgaatacttgcaaattaactaggtgttgtcaaaacgagatggtaactgtcaccaggggtcaggaatgcacttgaaaacatacactagttattgttgctctagtttctgcctcttctggcctttagtgggtggggaatgtgctaaaattctatgttcatgctggtgttaatggagattgcaatttgtttctaatcattacaaatatgttgtttgcatcttttggtagtattcctttgtgagtgatgtgtgttctagagtgtctttatggacatcacatacaaattcttaattatggtcaacagaaactaagctattttcttttacaacttggaaacacatacacacacgcacacgcacacgcacacgcacacgcacacgcacacgcacacacactgtaaatcacaaggtaacattattcttttctgtgttagcaaactggcctgttctgtgaaatacaacttgcagcttaataatcggctttcaaaatctatggttgcttttgctggtaaaagccaacctctagggtacatgccaggaaacttgaattacattcaagtttatctttctttattttagaatcaccaaagtattttcaaagttgttgtaataacttatacctatgaagaatggataatctattgtttcatacccttcatttcaagtatgtagaaaatatatgcatatgtgttatcatactttatgcaaattttatgcatataaatatttaatattaattaacagtttccagtttcactaattgttcttactactgctgattttaaagtcttcatgtggcatttcattataaatatatgtaatatatttgaccctccattggtcattgttactatgcttcaaagactttggataactttgtaatgagtcatttattaggatcttgaacaaatcaatctccagttgcattttaggagagattccaagtgttagtatgactgggtcaaaggcaatgaccatgtttatagtttttgttacatttttaaattgtccctcaaaaccttgtatctatctttgatgaatctaatttctattttttttttcctgagtaaaatcaaacttaacagaacatataacctcagacgttcacgttctatttattaaacatgactcttaaatagatttcaaaatgtgtttttaattctccatatttagaactgtaaatgtaaacagaagtaaggaaagaatttccttccttaacactgtattaattcatttcactttaatagttgtttgcctcatcgtgaaaggaaaataacactgtactagaagtgttgagttaaaagaaggcctaacttttcattttgctcctcaccaaccatgtgatcattagcaagtcatttaaccttccttattctgtctgaatataatggtggctctgcctccctctctcacaaaataacccaggaaagacagagccataagtgttaaaattggtcaagtgaagcaaacaaaatcacaaattgttttggaaatatgttgaatatatccagttcatttgctaccaggatatcgtcttgttgaatgataagtactgttttagattgataaggtaacattaaaggaagaaatggtgacacattcctgaactccccatctgcacatacaagattgatttcagggtctggttggtataaaatatgccatgtgactgaagtgtgtagctggggccgacatcttcctagaaccgtgtgtcctgttttgtcagttgggggctattttgttctggttacctaccaggtgttggctgtgaacccactgtgtaccagatggagtgcttgattactgtgtctgttttagctgttaccctcctgacatttgtcatgccaatatataaatttgtttaaaaagtaaacgtttttaatgaaaaaatgagatatcactatcaattgccttagatataaagaaacggttttcacaaatgtttggtgtagatttctcacaataaaatccagtgatgacgaactttgcttccattatacagaaaattcttctacaagggcctcggaaatagctcagtaggtggagtgcttgctgtgtaagcatggggacttgagtgtatagaagtgagtatgtagcatgtgccagtaatcccagttctggggaggcagagactggaagatcccaggagctcgttgaccaggtatcctctactaatttgtgaaccccaggttgctgtgggagatccattctcatacagtaaggtaacagtccctgaagaatgacacctgaatttgacctttgacctctacacacatgagcatatataagcacttgaatttatctcatttgtgaatgtgttgtgtgtgtgtgtgtgtgtgtgtgtgtgtgtgtgagagagagagagagagagagagagagagagagagagagagacagacagagacagacagagacagagagagagacagagagagagagatagaaacagagaaagaaacaaaaagaatagattctgaacacaagataatatttgttaaagtttcatttcttgtttattttaactcaagagacagacaactgaaaagataagaaaaaatgaaaggtagagtggtgagcaggtaacaagtcctgaagacacattagaatgcttgtctcagttacagttatggagccagaatgaggcatttgaggaatggagaactagaacccatagtccttcatcctctccaccaaaataaacaaaaaccactggtacattcacacgtatgccctagatttaaagaatttctctggggggaaaatataataataatgcaggatatttatgtctggatgaatcagaaattttgatgagtagcctcaaaataagtactcctggcccatcatgatgcttaaattaagtgtcaacagaattggaccagcgtggataccagaaaaagaatgagctagtctatatatatatatggctgaagctaatacttgagttgctaggctgagtaaagcaacccttcctcccaaagtaggtaggcttcatctaggcaacgggacaaaggctgagtcagaggcactttggcttgctggcctgagccggaacatcagccttcacctaccctggagcctagactttccccattgcctgtcctgattctcaagccctcatactgaagctgacaatcatgcctcgttaatatttagttttgataaattcagattctagtacctcctacttggtgaccaaagaacttgggacttccagccttcatatgagccaactcataggaaattatctccatctatatgaaagtcacatgcatataccatattcaagctgaggggagtggatgtgtcttcactttctctctgaagacagaaatgggaatatgactcaagttttgtaaatctgatgtcctcactgggccttgataggggtcttgagagaacaaggtggaagccagaagaaagtcagcaaggatcttgcggtgacagcagcagaattgggagtcctgtgtcacatgcagggggagcaggtgcagacagattagcagccatgcatccagtatgctcctagtgcaaataataatgttgataatgttagaaacatattaaagcgtccttggctgcagcttttgtctgaagcttctactccatgggaattctgtgtaaatttgtagcagtgcatatagtttccctggagcccagaaaagggtgaaggatcccctggaactttatttacagatgtaagctgccatattggtgctgggaaccaaacccaggtcctttgcaagagcaacaggtgctcttaattgatgagccatacctcctgtccttggagttgttttaagatttgctaaaaatgagagctattttaagggttaattttcaaaaactactctataggttaaattttttaaagttgtggagtctagtatcttctgaaacaattgttgtttctgggccagaacttttacagtatgattttttttttgtattattgtgattaggcacaaatgttttggctcaaaacctgactccatgtctttggagtttggactacctctctctttatttttaatatttctttacttgtaaattgaaaataataactagacctggggagacagtttagttggtaaatagcttgctgcactaacttgagacctgaatttgcatctttaggacccacaaacaaagcagggcaccgtggtacatgggaaaacagaaacaggcaacctgactaaatctctgaagttcaaatccagtaaaaaaaaaaaaaaaaaaaaaaaaaggatcttagaaagtaaggtagaaatcaactgaggaaacctgaccttgacctttggccacacatgtagacactgtggccattggaaacacattcataatcaaaataatatctagtccatgtggccattggaaacgctaaaaagagaacataagtctctgaatccaaaactaagtagatggtagctattactataatgtgaacaataaaaatgtttggcactgaaaaatgatcatgtgaatttatttactgtcaggaagatgttaaagaaaatcctggggaatgtacccttgctttggtagtgtttgtgtgtgtgtgtgtgtgtgtgtgtgtgtgtgtgtgtgtgtgtgtgtgtgtgtgtctgtgtgtgtgtgtgtagctcatagattcccttctatctctaaagattctgttccttttggaataaaaccatacactgaagcccggtttcaaggacttctggcagccagactacattgcttgctcttcctcaaattcattctatataattctcctgcagctttatcagaatttcccttccatctaagggtcttcatctcctgatttcaaaggcactgcctatgtctttgtgcctatgttcaagccactggttctttgatattcaattcaaagtctccttcactgaggaatcttgcctcagtcccagtaatactgaagaaaattgcttcagtcttagattcctatagtattttacttgtagtttggtttaaagccatttaatctttattttatatttgtaaattattttttctttttaaattattttaaaatttattgttattagtagtagtatttacatcctggctgcaatttcccctcccttctctcttctcagtccctccctggacctcctctctaaccctctcaatccactcttcctctgtttctatttagaaaagggcagccctccccatggatatcaaccaaacatgacatagcaaattgcagtaagattgcatacctccctcctggcaaggcaacacagtatgaggattatctattatctgttattgtgatccttatgtaccgagttttcctggtttcttgctcgagaatcttacagcagacttgctctcccaacttttcctgaagactgattggaactcctcagtgtgtctggtttgttatcacattactttagtcttagcactgtatttctttcttcaagatttgcatcaggacctacactgccaattcctgtcccatttccacctgacagggaaaccagatgttacggtcctaacttccactgtgacttccaggaccactgctgccagggccaatacatggcagagtagctttacagaaccaggaggaatgcctgttgcttctgattgctctttgaaaatgtttttagattagtttattttatgtgcctgactgttttgtttgcatgtgtgtatgtacactctgtacatggctgatgcatgagaaggtcagaagagtctgggagatcacctagaagtggagttactgatggttgtgagccatcatctggggtctgggaaccaatccttggtcctctgcaagagcaacagctgctcttaaccactgagccacctttccagcctcagtcccaagttcttgagaactgaagcaggagatgaactgtcctggcaaatgccacatccatctcatcctttggactgcagagatttggctcctgattagttttttgtagacctgacactttccccattagaatgagtgcttgtcaacaagagcccaagagccactttaacaaacaatgtctcctgtgcattagtttgtcaggcttttctagacaagattgaacctcaatttcagttagaactgtggtccctgctgaaagctctactcagatgacaccatctgaacatggctggatggtaagcatccttagggtacaattcatgttcccagttcttgggacacaatgggaatgacttaaagtaatagtatctaatgaggatatgcaagttcctcaagatcagaatgctaagatgctgatacatgggtctttttctaagtcagttgccttatcatgatattatacatagtgggaggtacagtgcatgatggacaagcacattgctaattgcagtcagaaaggtctgggcttctaaaactgtccccatctattaattacagaataacctggagtaagttatgataccacttaaaaattcacttcctaaatctctggaatgggcatgccacctaccttagaatgattataaagttaaacttgataaacaaattcacatacaatgctgtgatacataatatctgacacacagtgaacatgtaatgattataaaagatatattaaagatgtgttttagaactttgagagaacacaagagtttcacacataggagtcaaacctcaagtgcttgaatatacattaagttgtagcttataccacatttatcacatttgtttttatccctctgaccaagccagtgggagtaggagtttcccaatgcagcatggctatgaaaagtggatggtcgtggacttttctgcaaatgacctaccataagaactttcttcaagatgtttataatagtaaaagaagaaacacaatggaatactggatgttagaacaggcatctcttcaaagcagacataccagattttattttgtgttttttctaccctgtgtttattttcttgccttggctctggtcaccccattgagtatacacacatccccccaggtggtgtggtctgacagaacaaaccaaagtcagcatgcttcatcacaagccttcttgctggctgttagttcttgtggtgataaccactgctttctgggttggtctgcctggctgttcaagtagaactagatgggaagggaaaggaacatccttggctaccctcttataaacaaagtctgtattttcagtgagcaaaattatgcatcactgtatttacatgacagttttacagcttgaattaaaattgtttaaatggttatcaagaatcaaaaactgagctctgtagagatgggcaatgcaaagtaaataatgcatttttggatgcaaatattccatgtgtcaatctaatctattgtgatgtttgtgactacacagcatgcttgtgcttcctactcactatcaaaattgctcatgacctcagaatctttaaacatagtacagaggactaggcgtgtagctaagttggtagagtgcttgcctagcaggtgtgatgcctttctttttgtccctaataccacataaagttgggcatgatggcacaagttttaatagcaccattcagaggcagaggagtcagaaattcatcattagctacacattgagtttaagtttgaggccagagtgggctatgtaaaaaagagcctgccttaaactaaaaagtatataaatgagtaaataagcatgatacagaaaatgctctgcctctcagttgaaacacaaaaggaaaagcttttgtattactgttctctggaggattctattttcattcatcaatgctattgtccaatgtttattatgggatgaaaccagataggaacagtttcaattcattagttgtattaattatttaatgctcttgataatatcttaatagtaaactagtatttttatttaggaatagaaatttaaaacactggctacattttaaattatgaataatcccccaatagggaagttggcaattagcttctgctgttgtataacaaaccactccggaactgagtggcattaaacaacaaccattatgtttataattctatgggtcatcagcttgagttcagctctcctgggctgcattgcagctcccagtggcattaatggggttcatgggcatgtttacaggcatcaagggggttgatgacctcactctcatgtctggtggctagccgcctgttggcaaagacaatggaaataactgggtcatgtcccacttatcatccagcaggcagtgatacactggttctccacataatgattacaattttcttcatggcagggaagatagtcgagtcccaaatacaagaatacattttcaaaggcccagctctttcacatttgctaatgtcccattgactgacgcaagttacacgttaagcccacagtcatcatgagggaaaatttcccaaagcgtgcccgtgagaaggaagttataatagaaactttaaatctatcacaggggcacattttcaaaatggcagtgtatggttgtaaaatagtaggcccatgttcacatgttcctgaaaagatttactgtgatagttctacttagaagctcagtgcttagtgtcacacacttttcactccaatatgtaggaggttaagataggaagatgaacaagttcaagtccagcttgagctatacagtgattgcctggtcagtttagactacaggaaaagaccttatctaaaaaattatatacttagaaaatacattgaaaaatctaatgttacttcaattaaatgccatcttcaactactgctttgatattatctgtactcctaacatttaattttaataatagctgaatgatgaaggtactactgttgttccttcagatatgagaagttggagactcaaagcacacatggatcttgcctatattacaatagctgagttgtgatacatttagggagttctaagaatgttatatgtacctattgatagcactcattagtaacatgggaagatactgatgttataatattatttaataatcagaacaaaaagttactttattttaaaagccaagccatgtattacaataaaactaagaactcactgctattagatttcctatcacaaacatctctataattagttctatattttactttaactggaattgattgtaaatgcaatataaactctagttttcagagaagtcatataattttactcactactaaataaatcaaaacttttaagcaccatccattaagctatgccattacatctgaaaatacatgaccaaaacactaaattactgactaaacccgccttttacttagaggattataagttgaaatctttatcaagtctctacagatttcataatttattttgatttaaagcaaatgaatttatttgaaagaaagaagctaaattacaaattgaatatataacacttctacaacagtcatgttaagatacaaacaaacagacaaacaaacaaaaaaccaaaaacctggaaattctgtggaagaggatagagtttaagaaaatgcaaatgccttcatatagtcattgaatggcaacatttacatcagattttgatgggaatggtttattctttgcttgccctgttctctgacaatgaacttcaactgaaatcaaagtgtaaggacctgaattgtccagttcccttaagccctgttagacaagaatggcagggaatgctgtggttctgtcccttactgtaaaggtctggtgtgacataaactacttttcctttcatgttcatatgcttattgtaagggtatgtaaacattttaaaacacagataaaacagtgttttgtgatactccaaataataattaatttcagtaactagctcttaacatccatttgtaggtatgactctcaacccggtttactatttttcatatcaactgtttccacatagctatggatctctttccaagctacatgttcccttcagtaactattttctttatttttgctcatagtcttggcttaattattatagcacaatttttttttttgatttttggagatagggtttccctgtggctttggaggctgtcctggaactatctcttgtagaccaggctggtctcaaactcacagagatctgcctgcctctgcctcccgagtactgggattaaaggcatgtgcaccaccaatgcccggcttattatagcacaattatacatttgacaactggtaggataacagtttttgttgtttttcagatacttttcacaattatacaatgtctatttcatatgaattttaaaatcaattcacttctatttttttgcagctgaaattacatttaactcatacataaatctatctgggtaaaagtaattacttcccagaaaattttgtttaattatactatttttagattatagttattgaagaattaattcggggatgaaagacattcttattgataaaactgtgttgtattttttgtgattacaatctctaatttttcataactcttgcatgtaagtaaatgtttcttccattgtaacacctgaataaatctgttttactctaaggttagttacttcctcacaagcattgtctaatatatggtgtatcaaatgttcattaattttatctttatttgatgggggaagtccttatgtgtatatgtttgtattattggttgataaataaagtgctgttggccaatagggaaacaagataggtgggcctaggagtcgaggaggattctgggaaatgtagtaaagtggaaagtggccatgtgatcccagcaagagaggacatatgctgctggcatcctctataggataagtctttataaaatatatagattaatggttatggttgatacttaagacagagctagtaaatacaaaatcctagtcattggacagcagcaatgtaaataatataatactctgtgtgttatttgggggccctaatgtggtggcagaattcaggcagctggtggaaagagttatcgttacatttatttataaaaaattttaatttctatgaaacaaaaatagactccttattccctaaaagtagagcaacggccatttaggtctttatatacattcttattagcccagcacacacatttaaatctggaaacttagttgtgccaaggtatttttgttgctttaatcaatataattattttaacctggttttcgtagagaatagatttttatagccaagagcatgcagcttttataggagaaatgaaagcaaagaatacagtaagactagagtatcacattattggtaccatagttaatacttggttgcttcagataactttttttctcagttttggaatttggttaaatcaaggtctcttacgatgaactacttgatatccgggaggcactggtacttactgacaagtgtctggccttgtcctccccatgccacccctcccatcacactgtcccctgcccgtcagagagcatacacatgcaaacctctcctcagagggttatgaaaggattcgctaaactgtaaaatcatatagaaattcagctggttctttgtttatcaagataaccctttgtttaacaaaggtgaccatgtgtccaataggttttctgttgccttgggctttctgtgaattgcttttacaatgaagttttaggaaactaagactctacccccaccccactgtgtgcacacgcacagtgacaaagaagtatgcacatggcctattgcttttctgtctccctcccctgtaataacagcacttggggaatgtgcctttgcttttatggcagtcatttgcttacagatctgagtagcactgagtgactccccctgcactctcatgagttagttcactggggtcagatgcgctttctttctcacctcagcccctcccacatctagcagagcatctgtgagctatacaacagagaacaaaaaataatctgcaggatgaatgaaccaaagcacatctgttcagataccacaaatatttattttaatttccctttcaaggcaagaatgcttgttccatgacattgttaataaaaaggattgttagcataaatggctctgctcctgtatctttcctagaatgctaatttgacatttgcccagaaagctagatcagtctgactggaggggcagaagctgccagtccccaatggatagccactgccctcagcaatcttggcatttacaatgcttcttcatcactctgcctctgtgctttacatgaaagtatctgacggctctgaggggaggcttttaaagaaagaaggttagttttgactgatatacctgaattagagaaagaggttatgagaaatttatagtggtcaaaatatgcatgcttgtatgtatgcatgtatatatgtatggcagggcccacacaatatactggcaccgccttaagtcaccctcatgtattcctggtagagtttcttgctgatgattttagccacaggctgaatcatgtctgcttgcctgctctgtaaagtgatcttcctttattagatggagtcttgagtgaagggtggtggggaccatgtcttcctaggtcaatattctgtctctcccccacctctctactctctgcagattgcctatgtgtgtgggggttgggggaggttgacaaggatgccttggagagggagtagagtgctgatagtgcgcttttcttggttcatggagcagctttccactggaactggtttaagacctgaacattattatgggaaacatccaaatgtttcttgacttttccatttacagactgagaaaatcaatatgatacttgaaagcaccatctgtaaatatgggaatttatttgcttctccaggaaggaacattgtaggttctggggaaccttttacatctacttttggtagatgtaaaagtaagttatacattattttttttccagcaaatgtgtagatattctaacaaaattacttacacatagatatgacctcaatgaacttgaagtaatagaacaacaactgaacagttgtgcagtcagatcagagataaagataattttgacagagataaaaatcaagagactgtcaagacagaaggtgccttatgcagctttgtgcatagaaactgctcatttaaaataaccagcggtgagcatagaatgaatgtctccattaataaagagcaggtaaggaggattaaggagtagagattattttctcacattcctagaagtatgcacagctggtaacatttgtcttgtatccttaaaatatcaaactgttctgaggttaagcctaccaagtccagtaagacatacctcacttatttaaagggaaagaggagagtgtaaatgaagctgaggggaaggaagggcccacactctttaaatgcagcaatgcctttgtcttcttactgaacataaagagggatggtgttgtaggctgaatttgactagcagttctgaaaatcatgacataacactgcttagttaggttgcaggctagaatccatgcaaggcattagctgttacctcttcatggatacatgattagtaaaaatgtgcaggtttactattagaatgtttcaccagtgattcataactcaatgtgccagtgagcaactgcttccttagagagggactctgcaagcaggatgaaagagacacttgcttcttgtcagataacaaccttttgtgcttcaggattttatattgttcatgagaagaatttaattttttacatgttccaagcaagggagttcattttcctcattaaaaaaaatcccaaatcaatccaaaccacatctaactcagaaaagggtttgtattcttcctctctctcatttgagagaggaaaaaattacttcctctctcaaatgtttgacatcagtatagaaacctggaagatcatattatgtgggattatatgatttctgtatgtgactatggcaacacattcaattcactaaccaagattacatttaaatatattctaaatcttgtattgaaaataagcaataccacaaaagacacttcttgatattttatggagaagacagctaaagcttggtgcactactaattgggacaagattacagagttaatccaacaaattacagaaacacttctactttgtagccaatcaaactaatgaatggcttcaggccttcctggaacccacaattggcaggatttacacattggttacaataatgtacaatcttaaacataaaggccatttatagaagagagctgttaaaaaggccatttgtactgtcaccaatatttcttaatcagttgataatttatagtaacattttacatgctcaaatatccacttaaaataaaatattgctacagaaaatgatgctttgggaaagtcaggctctaaggctgaaaaaattacttcttgcatttgtaactggcttcttgttaaatgatggttgagtagtttcgtagttttatctcgtcaccttgcaaataccataaattgtaggacttaaattagcatctactgatgatcttacaggtctggaagtgaggagtctgggttcagcacgcctgagctctttccttagtacctcaaagggttaaaattccagtgtcatttgtcatttctgatgctttctcacagggatcccagagcctcttctcagcacaagaggttgaggcaggagtccctttctcctttctcatagacaaaaggcccttgctctctgtgtctgctctatcctcaaagttcacaacaaaaagtttaccttgaatgaattagagaaattggattagatcaagctcacccaaacaattgtcttattttaaaggcaaaagacttgtgatgtcaattctagctttaacaaccctccacagccctgctttgattactatttttaattaatcaattaattaatgtatttattttacatcctgactacagtttccccttccttctgtactcccagcccctcctccaacctcccctctacctccctccccaactactcttccgctgtttctatttggaaaagggcaggcctcccatggatattgacaaaacatggcatatcaagttgtagtaagactaggcacctcgctttgtattaaggctggacaatgaaaccagtatgaggaatagggttccaaaagccagcaaaagggtcagaaacaggccgttctcccactgtgaagagtcccacaagacgatgatgtatacaactgtcacatatgtgcagagcagtttttaattgattaactgagaggtggcatgtgtaaagcaggggtacggagagagtatgagtcatctaagccagaggtcttcaactcctttgtatgtgtgtgtgtttgtgtgtgtgtttgtgtgtggggggtgttcaaatgactctttcacagaggtagcatgtaggatagcctgcatatcagatgttttttagttttgcatatcagatgtttacattattattcacaacagcagcaaaattacagttacaaattagtaacagaaataattttatggttggtccccacgactgaggaactatattaaagggctgtagcattagggaggttgagaaccactgataattgttccacccctactaggctctccaacatttgagtatcctcttgggagaattaaagcaagggacacacagcatggcactttattcatattggttacaattaagtgataaatgacaaatcaccttgaggatttaggtgttaaagatatatatatatatatatatatatatatatatatatatatgtttgtattcttgaagttcatgaggaaataattaatagcttaaagtcacatggtagccctgtcttcatccaagactctaataatctgtagaattggatatctgcaatgtattgaatatcatggtttcctgtttaagtattatatttcaaaatttataagagggcttctttttaaaacatatgctcagatacagcatataaagaagacaatgactcttctgttgaaggccactgaacagataaaactatttttacaataatcaaaccacattgtgaaaatgatttatgtacaccactctgtggaggaagatttttcttttaaaaagcaaaaccattatgaatctttatttaaattcaataaatgtaatgtgatatatttagaaggtttaaaaatgaagccaacctttaatttgctatcctcatgctctatgtgtttttttaaatgaggatgttggtgtgtatctggacttaataagcttgtattttgagcaagggatggtcacacttcttggtcaccaggacatggctggtcaaagtaaaataaatgcttaagggaaaattcagtacaccagagaataagctgaatataaccttagcttttaattgtcaaaagagtatgctttattccttatggagcaggacacacctgtatttgcccttctctccaagttttaaaccctgtggaagtcataggatgaacatggtctgtaaggtccaactgagaacagacatctgcagagctgattaaggtcgggaggagaaaaccgtggtccttcctcattttataaatgaggagagcaaaactgagaatgcagggggctttcataagtacccagattgagcaacgactgaacagagacatgaatgtggatgttttcgttttagtttgccaatggtattatagctttctttcataaacactgtatttctaccactatgagaagtgctttggtgtagtgttgtagtaagcagagagatagtgtattgactctcaccccattctaaaggtggaatccctgccttgattttcacttctctagcccttgtttcccatcttatgtggccattcttactgaccccgtaaacccgtacctgatcattttcttgggtatggacccttactatcactgatatactttctagaagatagagacaccaaagtagactcacctttggttaccttttaaaattgtaaataataatgcctcctgtgatactaacctagattaaaagacaggaatcccatgagaactactgatgcctataacactttagtttctttaggaaagtgttctatatgaaagaaaacaaaagggggtaagccatcacgataacgtttgacagtggatattcttttttaggtgaaaatatttggaattgtatataaaatgtagtcctaaagtgtcacaaggagaacaagttcagtaagacagctgattgttagaacttggatcttaggtatgtctttggggtcatatgagattttaagcttagtgttttcctatgagcaaagacattctagttttgtttctccctgttttcatagaggcatgtatatccacttcacaatatattttatgtagaagcaggctgcactgggattcacatggtccatggcaaaactagacagtgctaccaaggcaaatcacctaatctgggcaaacattagtaaatccatctctaaaaaggaatggagtaaggagttagcttccagagtcactatggggattaaaattagcatggacaggcttagctctgtgctgtcatatattataaacacctaggtctaagagagatggtttatctctcagtaggtttggtatctactactcttgcagaggacctgagttcagttcccagcatttgtgtctgttgactcacaatcacccgtaactccctgctccaggggacccactgcacttttcaggcctccttggatacccacacacatgcctatgtacctacacacagacacacatatacacaaaattcaaaaatgagagctggtcgctgatggtgcacacctttaatcccagcatttgggaggcaggagaaggcatatctctgagttcaaaaccatcctgttctacagagtgagttctagaatagccagggctatacagagaaaccctgtctcaaaaaaacaacaaaagcaacaataatctttaaaaatgttcagcatctttgttattattatccagtgactaaaagagataattttttctttaacatgatattctccacattttctactattcttgaccacggaacatgtaaacattgctataggcatttaaggaaataacttcaacttctttgtgactgagattgtttttagtaaattttttctcagggcactagatggcgaccttcacctttcataaaaaaaaaaagtttcattactacttctgctccaacaaaagagctgctgcagatttagaagaaacaagggtaatgccacatctcacagctggaccactggaatcccaccatgtccaaagggtggagaagccaacaccatgacatcacagccttgaactcaaacttttatactgccctgggcttgggctatgtctgcaacctttcatcttatcaggcttcccttgtgatctaaattacacagtttcagttaatgaacaagacttttttcccttccacgcatcaacattattttaaagtgactcacttaaagccagacagtggtggtgcacacttttagttccagcactcgagaggcagaggcaggcagatctctgtgagttcgagaccagtgtggtctacaagaactagtttggactcacttaaaaataagtttaatttagggaaagtggcgggtttcgagttctgacatacatatgggattctggcttaaacgatccctttaataggcagaagaaacacttaaaacctctctttggggccagagagatggctcagaggttaagagcactgactactcttccagaggtcctgagttcaattcccagaaaccacatggtggctcacaaccatcgttatgagatctggtgccctcttctggtgtgcagatatacatggaagcagaatgttgtatacataataaataaataaaatcttaaaaaaaaaaaccctttctttgttgcagacaggataagacatgggagagttctcaagaacctttaggaaactatttttatttttccataagtaatgttgaaactgtaccctaggcttttaaacgtgataaaagttttttttttttttttttttttttttttttttttttttttttttgtgtgtgtgtgttttgcatggaggttttttttttttttgttgttgttgttttgttttgttttgttttggtttttggttttttgagacagggtttctctgtattgttttggagcctattctggaactcgctctgtagaccaggccggcctcgaaatcacagagttctgggattaaagacatggaccaccaacgcccagcacatggagtagtttttaaatacccattattttgagtatttctaaaaaggattgtagtggattcccttttcacacaggaggtgacaggaaactaaccatcattaccaccacacacaactgagtctgggtagaggtatttgcttcccttcagaaatccagatgttgtgcttcatgattctaacctaatgtaatcagtgactacagctagcactaggtaataaaggatttccaaaagaaaacatattttagggttagttagaagccaaagcacatgcctgttttctcagaccaggtagtatacttatttacttattttttaaagtaaaaacacacactatttttcccctttaaaggaaagtgtttactagttaagagaaactctgttttagttgcatctgctaacatttgttaacttgttgctcattacctgaaagaatgcccccccccatttaccaaataaatggaaaacaatgatttttttttataaaacatgctctctatggtgtacagtggatatctttaaagtgtagtaataattactaaatactcaggatcaaaggggtataataattccgttagcattggccagatgatggatgctcagataagggagaaacaaagatgaatacggttgcaatttccaaattcaactgggagggtgagctagcagttcagcagctgcagtggccacttgagagccatgaaagatgatatttgggtgctcaatatacaatatttaactggagtagatgaaataaaatccagactttaaactgctcacaatcagcgcacggccttgcgattttccataaacacttggctcatcatgatatgctcatccaacttcccctccagctgtttggtccacaatttccagtgaagttctgtgctaccaaaactcggaattgctattattgctgttgccctgtcggtcattcttattagtgaaggtctcaacctcagaatttgacagcgagaagagatgcacacatgtgcgccttctctcatgaccacatccaggcatgcagagcagaaaagaaggaaatggcgaaaacaaagatgggtttcttttggtcgtctaaaggcaatttaatatttatgaactctctctctctctctctctctctctctctctctctctctctctctctctctctctctctctctctctctctggatccagttacaagcactgcgtcatcctcgagagatcacatggtaattgttgctatttcaaggatcaagtgtcataaagcaccccatcccactcccttcttttggtaccatatagcctagaagagtgactgtgtgatggagtaagctcaggctctctggtccagccctccgtagaaaccaggctctctcggtggggtggcgcgctcgcgtattctcaccaagcgactgggaaagggggacgagggaggggggtctcaggggaggaagggcggctctaattggtttctcaatgaaagataatcacctattccccagagacgctagggattagcactctgcctctcctctccttccttttagacgcctcatcgtcccctctgagcttctagtccattcagcagaagcgatcgcaggagcggggccacactctgtgttcccggctgagcgccccagtgcccggctcgctgcgctgcgctcctctgccgtcccagccgccgacttgccgcgggaggaaaagtttccaaagggggggatctggcttaaccataaaaatgagtgaactggaggaagactttgcgaagattctcctgctcaaagaggagaggatcaaagagctggagaagcggctgtcagagaaggaggaagaaatccaggagctgaagaggaagctccataaatgccagtcggtgctgccggtgccctccacccacatcggcccgcggaccacccgggcacagggcatctccgccgagccgcagacttacaggtccttccacgacctgcgccaggcgttccggaagttcaccaaatccgagaggtaggcgcagggcgtcgcggggcaggggccactctctccccgtgcccgtggggactgcgttaggggcggctgggggtgggggtttgcggctccgggatagcgcagggcgccccctgctcgccgtggcggtccgggaaggggaagtgtttatttttgtttctgcgcatcacgtgctgtggttgtctctggcgggctgggaaaggcgagctcttcgtggagacgcgcccctgtggcgtgggggtggggagagggaccgcggaaagtttgctaccttgcgcttgacggcgcgggctgctgcctctcggggcgcccacactgggactgaaccctgaccgtcccctggcctggagaatttcccagaggcgacccagggactcaggccgcggagtgacctgaggctggctggggtcgagttcagtttagagacagagtttgtctggatacagtgagctctgccaagagggctctggcccggttggggcggaccaggggctggtctccaccccaaagatccagcctccagcaacggattgggagggaagggttattcacagggtcactttcaggggagctgtgatgtcatcacgagaaggccactaaactccacctctgggtgctcatttgcttgcttctgttccttccacaagtgccacacttagttgtcctggggttggtggaggctgggtcaccttgcacgtgaagcaggatagggacaactgctcatcccagtgcaggggaacgagcacttctgtttgcttcaatttaaaccccttcctggaaaagttggagtagggagcgaagggagggagtgctttctctaggcgccacctcgcttctccctttcttcctccctggcattttaagagccaaattcttccatttccaagttgtgtagtgtcttcggggtgttcagaggaggctggatggattttggccacagtaggaagattttgcactccacacaccgcctttgcggagaaggccgatcgatcggttgcagcgttaaagccctgtggacattagggagaggaagtgcagactccaaagcccattactggcttttagtctctggaagtgcagggccgaaagtgcatttctcaggatattgaatattccattaggcgagccttcatgcccgcctacctcttaccctctccctcttcttagatcacttggtgtctgactttggggtcctccggagactactaaactccccagcccccaatacacacacacacacacacacacacacacacacacacacacacacacacacacacgcacacacacacacacaccctcttgctttgaggctagctcttctaaagagggagccttatcaataggtcttctctgggccagttccaaggcccccatgttcctgcaccttcactgtactgtaccaactctctagtgtgttgatcactgtgtgaacagccaaaacagacaaccaggaggttcaaagctgtcagaagatccagagctaagagtgggtggggataagcaaacaggaatcctcaggaaggataccacttaggaacgcgggcttttctgaacacggatctcagacagctttcagataccccgagtcaccttccacttttgaagtgacaacggtaccttttggcccagcctgccttggaagttcctattgcccagaacgaggccacgcccctcccacttgggctgaaactgcagagttagtctttggcctggcccgagcttgggaagctgctacagtcctgcctccgcctggctgtgcattccgcggccgctgccctgcccggcgctcgctcggcagctggaatcaatctgcccacctccttaagaagccacttcatcagcggtcaccaggcagctgcttgcctcccagggctgccgcttcgagctttatcgcatttttgaaatttcagatttcgtgtctgggctgtgccgcttagagtagggcttcacagaagagaggaaattctcaccagggtctggagaggaaggtgtctgggctgtgccgctttcccagagcccgctctccaggcgccagcttacagagactttagcattctcaaagaatgcgaagtttctgtatctaggaagaggaaatggtttacatctcctatgaactatctccccctttgaccccacccccactccattcccatcgcagcgttttcttattgaagtaggaactttcatcacctcaagagaggctcatgcacgatagagtttaagttgtgtcttgaaccagtgtctagagagtgcttttctgttcctacttcctctctgtcctgatttacactgaactgaggtaaacgttctccaacttgtgtggactttcaagttttcaaagggaagcatgcagtttattttcagtgaggtgactcattagcatttaaagaattttgacaagtataatatatgggcatactatccattggaattaggcactcacttaaagagacaggactaaattctcaactgcaacacactttggtttagctgagaggaaaaaacacttagaaaggcatatcaaaacgatgagggttaataacagacaagatgctttcagaataaaagaatatttcctgtaccctgggtatttggatttaggaggcagacagtccatccatctccagtgacatgctgtgactgaaacagaaggctttattgcaatgctaatattcaattacaactggagtgatagctattgtgctgaagattcatttcaaatgttattaggacactccagttttatactaaaaagaaaataaattaagcttgaattaggaattttggggagggaaaacgaaaagaagattttcttataaatttaggctttagagagagtctgtaatctaaaaataatttacatagtaggtggcaaaatgtatcttaagcttttattgtggtggaaggagatgggagaaattatctactgctgtaatcaacttggtccaattatccagatttccatgtgtccacagaggatataatgcttgttctccattaagaatgatccaagtatctaaggaatgcttagatgaaaattataccagggaagaggaagatctaagctctcaagttaagtatcaagtgaacggtatgatgctcatgtttaaaaagaaaacatctgacttattgcagttctcatttacagaccccttaagaaatgctctgtggggatcaagtgattatcactgaaaacttcaggctctttcatatgatggcgatgatattttaaatttatgttttaaatacttcctttttgccaaagaactccaagtatttcccatagattcctctgaactggattccctgcatgcatatacttcaatccagaatttctgatccctctcaattctttgcccgaaattttcatacacacacaagttccttattttggctgcttcattaactcgtgtatacccaagggactgcacacaagttttaaattagcttgagcatgggctagaatcaatattaactagttaccagaataagagcagacagtattccaaagtggctggagctatttttgtcttgattcccttgcttctgatgatgccagttgatcagctgaaactcaaactttcatggtggcatagatgcctcggactgtatggcccagaaaacccttgcctcccgcatctctgagccaagtcagttgtaatttggccttcagactcagtcaagaggcaagacctcattttgatataaacaacttcaataaaatgtgttctggctgtattctgggcctaataccagtcattcacccattgctcatattgcagatacacagagctttgaagcaatgacaaaagcaacaataaagatgacttatctttcccatctcaacacaacagggcctactgcagcaagtcactgttgtatcttaacacatctaaagggtacttgcacttctcagggaaggaatttgacacttaaaatctagtgactcccagctcagtaccattacaaccggtttcaaacccaaaccttctagttctcagagtccgaataatagatgtactgtagagctccagaccagggctggtttaatctcagtaatgggtgagcacttctcacttggtagaaaggacctaccatgtgctaaactgacctctttcgaaaggggtcagtgactcttacagtcctcttatgtaccttgaatggggctgcttagctgggaagtccttaggcagttctgcttttgtaggagtgttaacttcgcagtctttccccttcttcttctcctggcttctgtagctcattgtcatgttccaggtggggatgatggataataatattgtgagaattacccttacatcctttgaattccctttgcatttactgggtaggagaagaggagggtgccatgtgctaacccttttacatcttaacatagttataatcaaagtgagtgctcaaaatattaacgtttgcatatctttctgattagcattgtaatagtctcacaacagccttgggtagagaacattgatttagttgaatcagatgaatagtatttggggaagtaatttaaggtaatggcatggtacaagatttttctgcagggaagctgataaacacccttatatcttgccacatgtcattgaaaaagacaggtctgagcactttcagcctaagctgtgcgtgagatgggtggttccctggtttagtgatgagaaaactgatcaaatccttgtggacatgctttttaaggcatctcaaaaatagaaatagaaggaaaatgtagtcttcttggttgtgcatctgtaccagagatgccaatttgatatctttggcatgtggttaatttatatctatttaagagacctttctttgagctccgttctggttctggaaacaagactattttccagatagactgcttatgatgggagttcctgttcatttgaatcaccaatataaatagaggtcacatacttagattcaaccttgtatccattagaaatttgacccccacaaagcaatctcaaccagacctgaaaaaaacaagagctgtcctttcttcttcctccttcctgactgaggtcctgtttccttgtgtgctcgtgacattactgaggagagatgctgagaatgcagtaaatcttttcttttgataagatttctaggtgatttcatagctgcacagggtatgaataattatttttgtttcccattgagaatttccttatcagggttcagagccagacattatcaaggattcttgtaggttttggaagttactgtgagctctgagataaaccagggatagcatatcctgtttcacaaaaggatatcagaagcttgggaactgtaggaaaggaatattgactttgactctggctgtgttgatgtgttgtgctgttggttcactgatgagaaaagaggaaaacagaaaataaaatgaaaagcacatatgcactctctcacacatatattcacacacgcagatgtacaaagtatgtacatttgtatgtagacaaaccaaatttctatctgatttcatttaatctaatagttgttattctaaagcttgtctaggttatctcaagtaaattcttgtaggaaagatggattcctgtttacatctgttattataaagcagttcacagtaccttgtatattctcaaatgtttttgcatgctgttggcacgttctcctatactgtcacccagcaccacacacaagaatcaatgcttgtcactcctcctttatcaactgcttgattctctcacccctttctttgttcttgactcttcctgagttgtggggtctcgcttttagatctgtgtttttggcttctagcttgacatctttgagccctaccagatctgtctgcttgcaaaagtctcagaacagagacatgaagcaaagagtacttattaaaaaagataactgtattttaaaaacttgtttatgcccttgttaggtcgtgtatgcatgagaatgcgcatgtgtgtttgcgtaatttgactttcgtaaattaaaaattatgtattatgaagatttgcaatgtctcaattttcaatgagaaactagtgggtccttaaaaggcatttgtatctcttatgtagatttaaaagggatgagtggtagaactctccttcttgttttaatattttcattctggaacaatagattacttttgtggaatggctaatctagtccacagaaaccagtagagactatgcacagagacaaaccttggtaatcctgtgtttaatgtcttacaagcattttaattttgttttgtgggtgaatagaatagaaacctatactgccttagaaaagcacacaataagaaatttatattgacaagagagtttcaaaataatatctgaaatttgtcctgcccaaagcactggttgtatgttcattctttctttggtgcatatttatttaatttattcttgggactctatcattagtagttagtttgttatccaggtatttaatttgggttgattttctttttttatgagtatgacatattggtgtcaaggtggcaacataactgtgctgatttcatgccagtgcttattttaaaaacaaacaaaccagcatggtataaggtatctattgtaatttacttgagtagaaattttagcttgactttttaagttgtgataacaatgaggcaactacagctactaaattcccagttacacttgttgcaaattaagactctcttttgtatatagtctaatttagccagtgtttcaaaatatattttaaattcctggatttgtcttcctttgagcacccagacctcaaaatgctgcaaaaataccattataaaacccttcagggctcctaaaaatatttgtatgtttgcctttcacaaatattcctgggtctgtttattcaatgatatggtgctatgattgtgtaacaagcaactcgaaagccttttgggtaaatgttagtgtttttcctgatgcctctcattgcccacacagtgtggatggaactcatttcatgtgttacacagtcactaaaggacttgtttatgtgtcccagagatgctgaaaatagaaaattcttttatatcttaggctgtaaacccttgtgtagaaaccaggtctgtttacaggaaaaattccaaccaaataaaaccagcaatttaccatgcttctccttcccatgaactgcctttcagagaaaaggtatatcttgaatatattaaaaacaagtgaaagaaccttgtgtcttccagggcaaaagtacttcacattcaatgacaagtccttttagagactaagatgactctaaaatacacaccctggcatcctctcttacccccagcagatttcaactgtgttgtcacaagaaaacgctatgtattacatcgaccgtaaggttaaaatgaataaatgactgttttcttttaaatcaaaattcatgaattatttgcttcttcaaaacaaggctgagtgcattcccaggcctttccccagggagagccattcactctcattccaatcagcttcctagatgggaaggcttacaaatgtatggcaggaaattacacataatccacagatggtcttgtctttttcacaggagtatgttacacatggggatatcatttgtcttgtgagtcactgcagggaaaaaaatgtctaagagccccgcatctgatctggagttctgaaaagtcagcttcttaactctgtgactcgctaagcttcttatttataaacaaaggcgttatattccctaggctcaacttagcacttactcttcccacaagatgggatgttcatattatcagtggcctaggaacgtttctaactgtgcacaagtgaacttattttgtgttaatagagtgtaataaatgctgggagaaaacatttgactaatgcatgggacccatgttgtgtagctacatcacttaaaataagctgagttttaatgtataacagattttttaaagtagagaagtgcaaattttgtataacatagatatggccacacagggatttaagaaatattattttaaagcccctttccccacaagaaatgaaacattgtttttatatttgttgctttgtttgctcataccatattttagaagattctgtctaatccggttctccctgtacccatctttagatattttacatagttgtctctcaatagtgttagaggaactgaactggggacacagaattagaattgctagcttttatgaaatatactctttaagtcagtttagttaagagtcacattaacacgacccaagaaaaacatctgacttctcttcagatttataatttttatcccacagctgatcataaatttgcaagaagcaaatcccagaaataataacggagaccggatgcctattccccaccagcctgggtctggtttgggtccattgtgctgggtccactcctccaggacttagttcttgttttggagggtgggtaagcatgtatatttaaggtgaaaaaatgaaggaaatgtgttagctgcaggaaaagaaatttacaatgccattctttcttctagagaatgattcaggccatctgctcacccatgtaagaaagggaggtcttcaggtttcagtgtaagtatccttttaaaggctgtgaggcagaaacaaagataagaaaaggcttgggaaggagaaaggataataagagagctaatttaactctcaccacaagatggcagcagaagtataatatttagcaattggagcccactggcactgtagaaagacctctaggtgaatattaaaatctattccctaagacataactttcttaataatagaattcatgtttggaaagtgtgtgatggatcacatactgatctctgtttttctcatcagtgatgattcgagggagtgtgtttaaaacgctgagtgaattgttctccagtgtttgtcttgaagaaaagccaaacaggacagcttggatggagagttctttgaacattaatgtcacctgaaggaaatgtctgtacccctatgggtcagcttctgggttaaaatttcaaggaaaagtggaagtggggaggaataatggacaattaagactggtctaaaatgtgtgggtatgtgatgagctaaatagaatcccccctcccttcaatacctacccccccacacaacacacacacacacacacacacacacacacacacacacacacacacacataccacaacacacatacacctctaccatggaaaaccaaaaagaaaattattataagaaaaaaatagatcatttactaggcaattcaaatagatgcttccatctccttgataattctataatacaattaagtaacaatatagcaaacagtttgagatgtccagttaatgtgacttttatatatgcgggtgtttaaatatttcaaaaaagaaacagaatattttgtgagatatcctgagtatagaatgtttctcagtatgaggtataaaagaactgagcatcagtttgcctgtctgccactgaaggaggctttgtgggtcatgtctaacagtgtgtaagtttttgaatcaatattcccttgaaaaagtgtccagccttcatgtaaaagggtatttcattcactttgtgacctcttgtcatgtgaactcccagggggcctgaatatgacatagtcttgatgctgattggcatctgtttttttttttttgttgttgttgtttttttgttttttttgttttaatttgttttgccttgccttggtgagattcaatagccaaaggaggttgtgtttttggtaaaaacaactaagtttagaatttcttcttcttcttcttcttcttcttcttcttcttcttcttcttcttcttcttcttcttcttcttcttcttcttcttcttcttcttctctgtttaattggccaccttcctcattactgtgttggatatttcttaaaccagcaagaaggagaattaaaaaacaaacaaactttaaaacaatgaacattttgatgccctaattggcaacaaactgctcttgtaaaaagtgtgttttagaattatgtgatagacttatttgcaactgtcaatatatcaaaatattccttaggtcagtaatttatattgttcctatgttagagacagaaacttttagaaagcctgtggttgcagagaagtgtggatccaatggagggctttcttcctggtgtgggcagtgtctagcagaaattaccctgtcagctatacacagtgaagcaaacctcaagcagcaaacaacaagcaggcatttacatccccacccccaccccttcacccagatctttgcctttgttatctctgcaaagcaaattcctgaagtgtaacagcagggtttgaggtatcctgccttgaaagtgtctggttatctgtgttcaggatactaggaaggcagtgtacttaagatagggcaggctggcaacactgtggacattcagatattaaaggaattagagagcaaatggcagctcttttgtgtagtactatatcatacttactattctaagaatctcatcgtatcttctggatcactatgggcaaaggctgcacctcaaatctgttggttatgatctttggatttgtctgtttccttgcttgcttcagctgtacaaacaatgcattctagttgtcagacattagaaatatacacaattaatctccttagtctttcctacttttcctacagtagagagccatggttgaacttaagtgtgtttgtgcaaacctttatatagaaagaaaactctgttttggagctgtggcttgtttgcttgtctccctaaagtagagtcattcctttgtaaactattcctcttgtgattaattatagaatctaggctttttgccagatcagtcgatatcagtctttctcatatccatatattacccccttctattcacggatctcaactcagttggtagtttctgttcattttattttattttattttattttattttatttttgttgttgttgatgcaagcagtagcagtgatggaactaatattcttgtagacagcttttgggaggaaatttattttagctggggcgaatgccaaaaagtgagagtggcaagtcagaaactaaattttaaattcaactctttaaatttggtgtgtgatagaaatgatccaaatcttatatattcaaaagaaaaaggcaaatcagcaaatttaacctttacacatgaagacagttttctaaaatgacaccaatatataaacattgtagaatcatggggaaggtctgatggattttttttttcaagacagggtttttctgtggctttggaggctgtcctggaactaactcttgtagaccagtctggtctcaaactcacagagatccgcctgcctctgcctcctgagtgctgggattaaaggtgtgtgcgacaccattgcccgccttggtctgatgaaattttctactggagttatagctgcaagaacacagtcatcttgaagcaacatttacatgcccctttgcttttcagatttatgaatctatattgcctttctgtgtgcttttataaattaaggaaaaatccccaagacaccactttgaaagtaaggttgcaattgtgtgtatctgctgctcttataacaaaggcgttctacaggaatcacaatggtttgttttctttgtatcagaataaaattgtgatacttgaaggacccagaggaacttgctctcccacttgggaaataacaaattccaagtctctcagctacattttttttttttttttgaagactggtgggaagatttggacatatatggtattggagtcactgagcacagtttactttttataggctagcatttccatcgcagcctgtcctcccctgcccccccctctctctctctgtcctctctccctgtgtgtgtcattgttcagatactgaattagatttgctgaaaggtatgtttggtagcatctcaatccaatcatattaaagatgatcaatgataagcttccatttttattacatttctttattttgtgtgtgtgtcatgtgtcagcccacatgtgccatggtgtacttgtgggggtcagaagacaatttgtaggagttagttctcttctgcgatcatttgtgtctcagcgttagaacttaggctgatagtcttggagacaagtgctattatgtcattacccactgaatcacctccaataagattaaagtaagagaaagaaactttggaagggtagacagaggagaaattttaacagcctaacccaggagtagatagtgatcaataaactaatggtcttgatgttcacagacttgaagaatcctctcacatatggattgtgtaattttagacaaattacttcatctccttgaggttaacactgacatctttgcaaaagtgggtatgcattcttatttcctataagccttgtttgcacatactgctccagagccgtttgtggactgttggaagatgatgggcataaactcccagtaaaatccctagcagttgtgtaataaaacctttctagggactgagaggttttccaaccagctgcttctagaagcttctgcttggaaaggattctaggaaatatcctgttcactcttttattttttttattacaaaacaaaatagtttaacaaacaaatcaaagatctagtggttctgaaaggttctggtttgccaaccacagatgcttttcagtgactggaactgagattatatcccaagtcccttatgtaccatataccatgccccctttagaatgtatcttaaatataagcagtgactagacaaggaaaaacagggtatgtgtaaaataaaacaggacacgtagaaatgacaaggtaaggcgctgtaaccatgttctattccaatgtaaaacataaacatatgatctggtttagtgacacaaattacacggactgctcatcactcaaggtggacaccctccagctgaagaaggttgtttatatgggtttctcagaaaagctgccccttgaagatgccaggaaagcattactatgcacattgctcatgaggggtaatggtaagaccaggactctgagtggaccacttgggtcagattcagggacacggacatgttggaagggctgcttggagtgtgtatcctatacatcaggaattcgactatggctacactgtggacagttgcacacggcctttcaagcttggttccttactttgcaacattgtccttctgtcatctcattatctttgttccagcatgccttgcattgccaattgcattgcaggcttgaagacagaagtgaggagccttgcagaccccatagcacagtggatccccatctccatacctgacagtcaaggtgaagaatgctgtcgctgaacaccccagggtgaatggcatctctagttcacatgaagctgtgcccttgagagttcccagtgcctgcttgctgttagagattaggtttttgtttgtttcttaagttatatttgatttttttatgtgaacaaatattattctagattttatttctcctggggcagtctggccagttaataagtgaaaagacatatgaagcattctggagatcaaaagacattctgtgctcttagtctgatgttgtcatacaaaaacaaatccaaagcctcagcctcttcagttgttaagaagcctcccacggttgttgacaggctcaaatgagctcatgcatgtgcaggatttagctgagtgctttgtacagtgcagtcattcagtaaatgcagctcttactgttattgtttgctctttctgacctcgttggccaaatatataaggtgcttttaacgctgtgccaggaatggatccatgtgtattcttcccatatttctcagcccacacttggatctacttctgctcattgcaatacttctgaccctgttttagaaatcattttgggagtcacagatggctctctggcattggccatatttaggttttcatccttggttttcattcccacccatggaagagtctgttcctctgcacacactttacactgcctctctctcagcatagcttcttacaaacttgtcattctaggaaagaattctagaggcttgtagataagctgacagatttagctgtgttagggcctgctctgtggctatgggctctctgaaccgaataaacatggattttcaaattcagtttgcttgaatgattcagcatcttcatgcctgaacttcggaagacaactggcttgtgagaccaccagctagtttctctggttgtttcctttcttctttcttctttcttctctatcttctctcctctctcttcttcttcctgccttcaagttaagttttcagtataaacaaagtgcagttacaaaaagtaatgggaatcaatgtgttacagctacaataataaggcttgaatcataagatgcactcattatgtaggaaagtctagaggatgcattctactgttcttttctcttctaggcaatatacatgcatgcatgcagtggctaagagatggggctatggaattacaaaggcctggatttcaagcttttgctagcttacattagtcatattgctctatgtcttcaagctagctttacctctgtaaagtctcccctccaaagtggtactgtgctaagaatccaaggtaagcatgaagtaaatgatagttactactcttgtagtttccatactcatgtgctagacaaagattccggtttgttcccaagttggggaagtctttcagaaggaatttttagttgggataacatgggaatagaagagataatacaggaatataagaactactaatgaagaattaagaatgagctctgagaaggtgcttatttgtctgaattaatttggccttgtccacagtcccatgacactctgctgtgtttccattatttactaccatcgaatgtgctctgtgcacatgagaagacagaggtcaaatacatgacaggacatccaaaccctcactggaacaggaatgccgggctctcggacactggctctatcaccgataattcacagcaggtgtacagggagaaatgggtagaaaccgggcagtgtgaagaccttctggccttttcagaattgtagtgcacatgaaactacttattgcatcaaagtcccaggccccatttccatggcgattttgagatttcccccaaaatgtattcctggcctccctgagagacagatgcatctctagtaatgtccagaaaggtatgtgtctataagtactatttcttggggccatctaagctaatcagcagaaattatgaaacttgaaataaaagaaatttgtacttttcatagttctggggacaagtacttcaatttcaaggtgttggcagtcttctctgaggactgctggagaggctcttttccaacttttagaggttacagatgctctctggccttctgtggcttgcactcatatcactccactgttggcctttctcttttgcacagttgtcatcctccacagtggctgtgtctgtattcctcacttattgtgagagggcagctatagcattcattattcaagacaactgtgaaaaccttgtttccaaataagttccaatttacaagtactgggtaagagtggtgagccttaggtcaccagtatttaactcactacacaatacagtatgtatttctctgcagtcaaaccccttctgggtcccatggaaaagagatgggatgagggggttgaaggaggcatgtctgtgttgatgatggaaggtttgtagacaatatctccaccttgcagggcatttctacctgcctttgcccattcccctcaacttctggattttccaaaggataggtgttaactgatagtttgttggttcagatgaagccaacatttggtttagatcgagtagtgactggtagttttcactgatgtacagggaagttttctatcttaggggaaaagaaacataatttcagtgctttagttccctatgataaattgtttctttacagttttcaggaatacatggaaagaaaccttaagcagtgtcaaaataaatactaattgaggaaagctctaagtatttaagtcaattaaagctatacattctcaaagatcaggcttatacttaggtgtaaattatttttcagttggtattgttttatgtatttgtctgcaattacattaattgcagttatcccacttttaccccaagctaagatatacacatactttattactgaaccacagagttttgttaattcagccagttctcttacactataccctcaagaccagaagcctcttaattatttaagagaagtctaacaatatgaactagttaaacaatataattggtggtttacttgaacataaaatcaagtaaaaatgaagtccagatatcatttgagaatgtgactaaaattgtgatagtatgtatatatttgggggacatgcataaaattaaattaattaatccattactttaaaagtactggggattcaatccagggcctagtgctctgcaactgagctacaccactttcttttttcttttcttttcttttcttttcttttcttttcttttcttttcttttttttttttaaacacagtaccactaagttccccaggtaggccttgaacttgtgatctttcctatcacagtccttggagaagctgggacaataggcctacgccaccagatccagataaccctttctgtatgtacgtgtatggttgtatacgtgttgtgttgcttatgtgtgtgtggagaacaaaggttaactctggcattttcctctactgttctccactatactttttgggataaggttgtacttgtacttggagtacattatttctgctaaagggtcatgagcccttggcctctatctgtctctgccttcctagggctgattaccttagtgtccttctgtgcatgttatgtggctgctgaggatctgaactcaggccctggagcttgggaaacaagtgctttaaccatctctctaacacatcaccaaacagtgatactgaccaaatggtgcctaaagatgtgcttggatttccaagaatagctttgctctccatgatggcagaaggtatttagaacgcactgtccagtatggtctccttgaagttctttgctaacaagaatccatcagagcacagattcttgctaccattgtctttgttctgtcttccttcactccagtctgactgctatcagatttttttcaaacattgcttttttttgctctaaagatctactagctgttttattttataaaaaaaaaaaaactttactgggaatgcccacatatttatatgagtgaaagggaggagggtcagcaaaggatagctccaatcaagaaaggttattgatattgtaggaatttccgtgggctttcttttgtgccaaatggttttaaggtagtttgaaagacagatgtggagttccagggtgccagtgaagaccagagaattgcactccccagcacgtctttggctctgtttcatattggattaatgccatttatttgggcgctgatataaagggcatctctcttacatttgtagaaggacagatgttgtgagggttggatattttgttgggaaaaaagaatcaagattccaaaagatcatgattggcaagagtagtggtttacagcccaatagatgcaacactttccccttcataacacataatttccagtgggtaacttatttgcccatgtaattgttgttcaaatgtacatatgggtacatagtactctaagtataatgtggaagcaatgggaaatgatacataataaaatggtacaattaatagtatacaggttggaggttatcacagaaaagaagcaggcagtaaattgaattaaagacagaaaatgtttatttcttcctctgacattattttatgtaacaggaggatagaatctttgacactcaccttgagtcttggctactatagtgttggtcactgatgctatccctgccaatttgctccattttctaaagtacttaccatgtatctgtaaagtttctaacaaagtaaagtactgatgtctctcaagttacatggtaattgcattcccagctgatttaagacaatttaagcccatgcaaaaataaacacatcagtcacatgtaaaacggatttaagttctaggcttagatggttatgcataagttttcctcctgcctgaatacctctggggtatttgaagttgtgtggattgtggaataactcactagtgtacagtgtggattttaggaagaggacagccaaaagacaacctcaatcttacaaattcccacaagagggcagtgcagctcccattgaaagtcattgggtaaacttacaacctgggaactggacatttggggtgagataattcctgtgtgtgtgtgtgtgtgtgtgtgtgtgtgtgtgtgtgtgtgtgtctgtgtgtctgtgtgtgtgtatctgtgtgtctgtgtgtctgtgtgtctgtgtgtgtgtgtgtgtgtgtgttgtcttgggcattgtgggatgtttgtcagcatcttggattctacccacgaaatgtcagtaactaaaatgtctctagacactacaaattattcccagggtaccagacaaatccacccacaactgagacctgaatgcaaatattttaaatggtgaattaataaaaaatttccctatgaaacttgaaataaactatataattagaaatgaccccatagaagcatttaaaaagcatttcggagtgagcctgtaagccatttgtgagtcaattagaggcacggttactaaaatttggtgcttttcactgattccaccaatacatgaaaatatttaagtgctgtgtttactttgtttttaatcaaattttatttaataaaatatttgtgatcatttcaaggaagatgcaagatacaagatggtttccttgtgattagtcagggaaacactgacagttatagtatttctatatttgaccaaaggtatttcacagattctgcataatttctggaggcggtgtgacgacagatggttgcaatggagagacacagagagagacagagacagagagagacagagagagagagagagagagagagagagagagagagggagagagagaacccatgtctgtatacacagtggctgagcacagtggctgagacgttaacactaatattcagaattaaagcacacacagcatatttaagaacccattaactcattgagtaagtagttatttaacctgtgtctactttgtgccaataattaatctggatgtggaaagtatggtggtcccagacttatggaagctaagcatagtcaagaacatcttccaaggatccagagggcctgggctcaactaatttcctttaaatttttcttttacttgcaaaatgagttactgaaagtaaatatctcttcaagcaattgtgagaatccaacatgttacatatggaaagtgctagacccggactttgctaatgctgaatgaaatggagtctgaactagattgacaacaggtagtttattaaagggatagtactcacacaagggccagtgaccaggtttacactagagccggagagacctgcagatgtccactcagccaggcaggagagagaaaaaagggctgagtgcagcctatctgctacttaaacccaagccggcatggtcagcagtacctctaaacagaattactccctacactctgccttgtggatattagctgcttcccattgccgaccactggctgtggagatcatgttaagagtttggactttatcctaagaagattaaccatagagggacttcttggctgtaaaaaaaatcctaaaccagaatcaatgtgaagccaagaaaacaggtataattatttaccttcatgtgttaaatataacctctctaacaaatggatttaattgtaaattctaaaccttttgttctctctaaatcctcctttggatgacttgagtcattgacaaaaacatggagaggctactcaatggttgagcaatacttgtttaaattatcttagttaatggctctcacctgtgcatggagtgccccttggataatgacaaaaacctgagtcttgtagcatgtgagtctggaacctcaaaatagaaagggcactttggggctgtctccaagcactgtgaaaccatggagaaccttaacttcttttggctgtgctcatggaaaatctgtgctattgaggttctttagggctacatgctaggtactgcagcctcctttctttctgggtgctctgagcttcgctctggtgttctctgcaccactgtctgatagaagtggccagggctttaggcctattgatccctgttgatggaacaaaatgttcctccttccaggagtcactgctatgggcagcttgcttctctttcattttgctcctgccccgaaggacactatcactttctcatcatgtcagccagtagaagctgaagctatctttatttttatgaatgagttgtctacagtagcctggtgggaatgataatcatcccttaaggtagtaatgatagtaatcaaatccagctgtacataatagggcttttgtagggaaagattatctcaagaaaaaacaatttccagtctttgaatctctgttgactctgcctgtcattgatgaggcgggatgttcagatgacacccagtcacttttctcttatccacatattaagaaggtcagtggaggccaaagacccaaaggcctgggaaagttggcgtgtgacctcagacttgctcgtttgatcctggagttctgactctgaggcttacatgtgatcctgagttaaaaataaacaaaccccaggctggaatatttggctcttatgcttcctgtttttcaaggaacatagagcaagactggtgcttctgtttcttagcgcagacatgtctttgatgaccatttgatagaaactctcagaaagtcacaaccatatgtgttaaatatagttccagaccatttctatctcacccaagaaagatcacacctatattgcaacagatcagagtctttggaatacattaaatttcatttcaaataagaaaagtgcttgcattgctttttttcttgggaaagtttttaagtataataatgtcttcattgtgagaaaatgtccagattgcagtttaactgttctcctgggcacccaggcagctgggcatcgcttctcactgtatcttcatcaaatattgatttaatacctactctgtggaatatagtgtctgtattcagagactgtaatatattgagcattttatatttttgttaattaaccattctaatcacagatttgtaatcacagagatcctcattaactttgaactcaagcaggcctccctagaccccaagatcagtcttattttctgtcacaatagtttagtaaataattaaagagtatcttctatattctgagcacttggtcatgtcttggggaaacaatgcttagccagggacagttgtggaacagatgtggctagaggaagctttcttgagtcttttaggggcattgataaatactgtaactgaagcatgctgggaaaagatggaggaagcctgaggcaggggaagctttgctgagaggaaggagagaccaacacaataccatgggggagacaatcttgggagaccaatgcatgacacatacgtcttcacgtgtacttttaggacttcaaaagtccagaaaatagttaactacaacccaccagtcactgagcagacatgcttatcagaatgcattgtgtatgtcaagtgaaccaaccctacctctaaccctaacacccccctgttcaaggattacagtgtcaacatggtgtatgataggaaatattttcccattgtgtttcatctgcatattttgaaaccttttcttccttggtcctcttctctgtcagtgactctttcttgcttttcccctgttaccatgattgaatctttactactatgactgagtaaaaataccattttttgatgggaatactgtacacatttcaggctagagtggctaaatacaacattacttcaagccccatcatttctgttataaatttaaaatgttatgttacttccccaactgttttgactaccatctcccaaagctgtctgaaaccaactggtaacagactgtcagaatttgcatattttacctctataagctattacagtcttacatggttttgttttattagtactaactatagatcagtaacaaaggcagcattataccccatttacatctgagaaaactgagactcagtctgttcaagtgaatccactcaagccagacccagaatgagctctgctgtgcattcttattgtatcacagatctgaggtttcaatactgtctttattatcctttattttataataattattttattattatcctaacaataagggcaatattcctttattatcattattattattatttattattattattgatattattcttttttcataaaagtattttttattctttaattactactcatatttacatatccatacccccattccctcatcctcccatcctcccatatttcccaccaaccccccaacttacccctgtctcctccccagggatagtgaggccacccaccagggaccttcaatatctgtcaaatcgtttgggagagggtctaggatctccttgctgtatctgggctacaatagtatccctccatagggaatggactcccaaagtctattgtgctctagggataaagactggctccaccattagaggtcccattattattactattcttattcttttagttttattgtttctagattagattctacttgtatgcagcttgaaaaatgtcatggttttgttccacccaaatcccctagccaagaccttactcagagagaatttgtcagtagttatttgtaatgtatgaaaaagttaaataattcaattcatgttataattcaagtgagataatatatgtaaaagagacttatctatgaactgcagcatgagatactcttaatgaaatcattaggaacaaaatatttcactaacacggagcttcaaactttctgagtttgtcttctagttcaaagggcatattattggaatggcaccattctaaaccagttacactaacctctgctgcttcttggggacctgagtctgtgaccctttacagtctttttattgggagtgttaccatttttaaacaggttggagaagccttccttgcttattttcttattagtttttaatatatacctgttatgctcactgtctatcaagcattgtttggaacattttctgtgtaacaaatcatttggtttcttaacaaaggagatgggcactgtggctaactgtgtgtggaaactgtctttgtttcccctacactgttaaagggtattgtgttgactgtagagatatagcttgtattctttttgttttttttttacccttcttcctttaaagatactattttattgtgttctgtcttgtattgtttttgacacaaagtctgtgacaagttttatgtttttctactgcatgaagtgtattctctttgcttgaaagattttgatctcctcatggatttttggcattttggttgggatggctttaaagtggttcagtgactctgtgggatcaggattcaaactcatatatttctctagagcccaaacccttaaccattgagtatactgcctcttaaggggtgaaaatctgcttttttggtttttgcttgttttttaaatgaggacatagaaactgcagaacataaacttgcatctgagtctcagatcattgttcttacttccttaacactgagaatacagttagaactgactttctataatttatgtatttttgaggatttaatatatgagtactataattattaaatttcccaactcctcctttgtcccccttactctgtttcaaattcatggcttcttattccttaattcttatttttatacatatgtacaaatttataaatacaatctgctgagtccctttagtgttattaatatgtgtatgaatttagggactggataacctaccaagtcactggagaagactgtttttccttctctcagcaagcattgtttgcagctcttcacctggggattggaccttgtgagattttcctcatccttgttgtgatatcatctggtgttgttattgttcagtcttttaggctactatattgttggaacaatatgggaaacagcttcctgttggtatagcagacaagctcacaaacttgctattctcctatctcttacaatgtttcctcttctgaaatgttgcctgagccttgggtgtaagggttgtgttatagatttatctactggggatgggcaccccatggttggttgctctctgcattttgccacttgttgctttctgtagtggtctctgtccgctacaaaaagaagctctttgctgaggagtaagatctacactcatctctgggtaacatatttgaaatgtagaaatcatactggtttagggaagtggcagtggtaggttctcttctagagcccatagcctcaccagccataggtagttgagtaagtttacacgcaagtcatgaacttcttcctgctgagtgggtcacaagtacaattaaatagctgttggttaccccaacatataagtcccactactactgcgcctttggggatatcttgctatgttggtcatggtttgtgattcattgacatcaaagttgagtaggactattgattgcttctctccctctctgcagcttacagagcatcttctggttctctgaaagctagtcctcagagaggaggcttctgggtcagatttgcgttgatgcttccaactcctctctcaagggtcttcagcaatagggacttttaatttttgggaagcaaccaagggcaatggcaatagcctagattgtttttcttgttttcacccaaccaataactagaagggaggattctcatatctggcatggggtgtttgtaggctttagcttttggggaaatcattgtcacccaagtgtcttaactttatttaaaatctccatatgtatgcaattttaagcaaacataaaataatatgattttctatagttttccaaatgttctcagtgctatttataccctctccccctcctccctctgcattactctccctaccaggtaagttccgcagaccatgcttttcctatgtccctctttattgccactgtatcctatttccctctctagagatccttctctcttcaccttgtccctttttactttcctagaaatgaccaacaattttaacaaagtggcagtaaacatcaactaaacaaaaatcattagcctttttatatgccaacaacagatatactgagaaagatcatagaaaccctgccattcccgtgtatgtatgtatgtatgtatgtatgtatgatgaataaacaaaaccaagggagtgaaagacctctaaaaagaaaatgtatcagaatcccaatcaaaatccttatctcattcttcactgaaatagaaaagaaattaaaattcttatggaatcacaaaagacccaaagcaatctggggcaaaaagaacttggggagttaccatcccagacctcaagatatattacagggtcatagtaataaaagcaacattgtgtcagcacagatcaggcatggaggcaatggaataatagaggactcaaacatacatgagtttgactacagccatctgatattagacagacatgtcaaaataacttactggcaaaaaaaaccatattcaacaaatggtgctgggaaaactaggtgtccatatgtagaaaaatgaaataaaacacatatttatcaccatgcacaaaaatcaactccagataaattaaagacctcagtgtgaagcctgaaatactgaaactgcaaaaaagaaaagaaaggaaaagaaaagaaaaggaaaggagcagggtaggggtgggagacaggtgtgttggcagtggatgtaagtataggaaaagtactttctgaataggactccatttgtctgcgaattaaagtcaacaattgacaagtgggaccttttaaagctaaaaagcttgttttcatatagcaaaggaaaatgatattggataaatgtccagaatatataaacaactcaaaaaacagtcaagataaaaagggacctaatttaaaaaatgggctatggatctgaacacagttctcaaaaaaagaaataaaactgggttgccaatacatctgccacctcaacagctatcatgacacatggggaaaatgttaacaactccagatatacccaaatgcaactataggtgtaattttctgtcccaccagccagctctcaaataaccacacagagacttattattaattataaatgctcagctgatagcttaggcttgttactaactagttcttacaaattaaattagcccaaatttcttatctatgttttaatctttctgccatttatatatgtactccataaaaatatacaagtatcaattggttaatttaatattgtttaaaagatatgttttgagtagagaagaatttaaacatagtttccacagaactgctgggcactggactggaatttggctgcaaattaggcttctggaaggacagcaggccaggccagaccagaataaagacgcagagactaccctcctgtactgtactcaggaaggctgaaggcaggaagggagccaccgcctcctgcttgcttcaaggacctcatttcttgcccagagcaagaagctctaggttccaatactactgagggctccagggctcttctgtgaatttctaggtacacagccagcaagatgtgtcctgtcctgtgaatatctaatcaccaaagtataacttgtacctaaactccagttacattgggtttggtttaaacaattgaaacataataaagattatgcatgtttatagaaaatgaaaatggctaagactatctcaaaaggtgttcatcatgcttaggggaatgcaaattaaaacaactctgagatttcatcttagcccaatcagaatggctaaaatcaagaaagcaatttacagctaatactggtgggggggactgcaaactggtgcagccactgtggaaatttatagaaagctaaaaatagttccaccatagggctcatcctgctgacctactcacaatactcaggagatggagacaacacaaatgcccttcagctgatgagtggactatgaaaagatggtacttacacactgtggaatactacacagctctaaagaaaaataaaaccatgccacttttatgtaaacggatggaaccaggatttttattatactgagtaaagtaaccgggacacagaatgacaaactgtactgttctcttattgtgtattctagctctaaatctttacgtgtgagaatataacctgagataccaggtccaactttttctaaaactgttgttaatatatactttcaaaattcagagaaatgaattccaacctggtggtcctgtggacactagataatgaagctctgcaaagaatttcagttaatagttttaatccatacattggatgggcatagaaatagaaatctgctatgacatttaattcacattaaaacagttcaatttgctgatctggtttttctcttctacatcagaaactgtgattggttattatgatttatttgattactgacatagggaaaaataaaatgtgacctgggaaatacgttttatagcatgaaaccctgttcaacaatgatattcaaatattttaaaatggagtgttgatggtgacaagttgggaattagtgatcaagaatctttttttttcttgtcatttcagctgtgagtttaaaggtagtgtaattatgaatttgtttcattattgtacttaccaataggaggcaagagttacatgctcagaaacagaacttattcagtggttctttcccttcattatttaatatccacgaatttcatgtcacatagatggatgtttattgactccacatatgagataaagcaggtggtttttgtctttctgaatctaggttactttgtttcatttgttaagctccagctcccgcccccaatgctgcaaatatgttcttgaagtttaagtaaaatggtagaaataatataagtagtccattttcttcttccatacatctactggtatacttgtaagctggttcagtatcttggccactgtgaatagagtatcaatgaatatgttgtctctgtatgctgacttagacacctttgggtgcataccaaggtgtggtacagttgtattatatgctagtcctatttttttctagcattttgagaagcctccatcctgttttcaatagtgactgtacccgtttgctttccaaccacaggaaatagagttctgttttttttttttctacatcatcactagcatttgcttttttatttcttcataattgcccttctgtctggagtgagatggaatcttaatgtagttcttaacttcatttctctatagccaataatattaagcacttttcatacactgttttgccatttgtatttctccactgagagctgtcagttaatcaactgatttttgatggtaaggatgctatgaccatttaaaaggaaaaaagatcatccttttaccagatagtgcatggaaatatgaatattcatatgcaaaataacaaaatgagactcattaaacaccacatagaaaaactaacttaaaatagaaaaaagaactaaatttaagacctatcaccatgcagttactaaaagaaaaacaaaaaccacaaaagccaaggattcacaccctcctaatttcctaatattggggttgttcatgatttatttatgccatcaaagacctaagaatcaaaggaaaacatgatcaattatactttatgaaagtaaaaaaaaggatgcaaacaaaagacaagaacaacaaaatacccagaccagctacagaatgagagaaaatatttgcatatattactacttaacatatatgaggactcttaaaacaggaatggcagcccatttaagtgggcaacacatttagtatgtatgattgacatacctatgcaaagatgttcaacatagctcacaagtacacaaatgtaatgctaaatgataatgagataccatcacaaccccatgagaatggctgatgacaaaaccacaccatgacaacaacacagacaaaaagatgataagaattattgaagagaaggaaggagttgcctgccaccagggaaagggaatgtactatggtttagaaactgtgaaaaaacaggtagatagctcctcaaaaaaaacaaaaacaaaaaacaaaaaaacttgctatgttacctagcagttcattttctagttctaaaacaagacaaccaacataattgacagtggggtctctaagagagttctgctcagaacatgtcaacaaatatatccatttactcattgtttgagatcctaccgtgtgctaggctttgttccttatacttagaatacacaagtgaataaaataaatactacaactgcccttacagaacagggctaaatggctataaaaatgttgtcatttctaacaactgtgaaaataccaaaggaaaaaaatcctgaaatttaataatagctctcagcacctcagagtgaaccctatcctcagaataattcaaaggtgtctattcacaatatttgcagctttttcaaagattctcttaattggaagacactgagatcttacctcccagatcaaccccaatttcagtccattttagttaccaggattgtcagcaactttcagcatgaaggctaggttttcctgtgattgcccttagggagtctggaagtagagacaggatccgaacggaaaaaggtcctccaggagatcaggtgatttatccaaactttcctccatattaattttcttcatctctctggaccaatattattgtaagaatgtaagttagaggaaccttcaggtaacaaagtgttaccaggaatttctgtatagtttcaaattataagactgaaatgagcacaggatctgaagttaaggtttgagctgtcacttcactactactgtaaggtaatatactcaggatcatccagtgtatgctacccaacaaaactcttaatttgggtgccttagaccataaaaggttataaaaagacaagagagcagatgctaaagatttcaaatataaaaccaaggtaattgtgaaatatgattgacttttctagcagtagtcagccagctggaattataagcaaaatgtaccaaaaaaactttgcaagatgttattaaaacaagaaaatgaaatcctagtattgtgtgtgattggggcttcataaccaacagttctctctacaggaggatttttttcgaaggaccttcctttccttataaattcccatgagttttgaaacttgtccctggtattattttagttcaacaacatttctttctttcttcctaagtgtaggaccagtgccaccatgcttatcccatgtagttactttttcttgttggactatctttggattgccagctcccaaatatccacatgagacttactattaattattaaaggttggccactagtttaggtttgtcccactaccccttataacttaaattagcctgcttttatattttaatctgtgtcttgccacatggctcatacagcacctctattctgtattgtacatctgaactcttcagggtttccctggtgtctgctacattccttctcctcttcctttctcttcccataagtcccacctatcctcaactgccaagccattggacatttagctctttatttatttatttattttggtttttcgagatagggtttctctgtgtagctttggggcctatcctggcacttgctctgaagaccaggctggcctccaacttacatagatctgcctgcctctgcctccccagtgctgggattaaaggtgtgtgccaccaacgcctggccttagctctttatttatccaatcacagtggcacatcttcacacagtgtaaagaaatactctgtaacaatcctggggcttcatgtactcatgcattggccactgatgttcagagctaagaactctggggatgttaggaagttattttcatacttctgtgtccacagctctttctgcttcctttaataagggcttctttctttaaagcagtcatttctgaggtctcccccactaacttttgctatcaaaaatcttcttgtggcagaaggactcagtattcattctttggggtagtggcatttgtgctcacagtcctgcatcctcaaacttcaatattgctaactcaaagaaggaagcctttttcctgcagtgtctgacacaaggaaagtagatgcccagcttatcactggaagcaagaaaaccctatgctgattctaagacatgtcatccctcaaactttttatacatataattttattcttaggttcttaaaaagtcattaaaaagatttaaaaagtctcccttacattaagatttcagtatgcaatggtgatctatgactgcattaaatcaaacaaaattcaatgattgaaaaataagcccagtatttatccctagcataggtgtggactttgggagcccattccatacagaggaatactccctgagccaagacacacgggggtggccctagaccctatcccaaaggatacaaaatactctgatgacaccctatggaaggcctcaccatccagggagagcagaaaagatatgtgacagataaggttttagttggggggggggataagggaggacgggtgggagaagggaactgggattgccatgtaaaacaatcctgtttctaattcaaatataaaaagttgaaaaaaaagaaacagttttacttttttctcacaaatctgtattgtgtcttaactttgtccttttattgtcagttgtaggttgattgttctaaatttcaccagctagttaattctacctgctcactgcttcctcagctgtgagtgttgaagaaaggtcttgtggttggcttttctccctattgtggtccctgtgggggagctcaattagagcatgcagaagtattagatgacatctctcattggaggaatgtcagtgccactttgtctaaaagtatgaaaaatgagctgtgttgctgaggctgtcttagaagttgcactggcattaggatatatgaggcttcagggttttttttttttgagttaattctgtttcttgtgtccctaagagtgtgtgtgtgtgtgtgtgtgtgtgtgtgtgtgtgtgtgtgtgtgtgtgtgtaaagtaaagcacaatggtttcttattctctttatctaacttcctattatccatcaactgaaattacaaagcctgtttcatctagtgtgagttggttcactaatgtaggtgtgtcttaataacttaggcatttcaggatttgaacagccagccattctgttggatagctagttagatattagcaaacatggaggacactagggctggacccctccctcgtacccagcctgtaaactgaggactagaactgcaggattctaattactgatgagaagagtaggtcttgagtcatatctctggtcttcagaggagacctggcatccacaacttctcagcaggtcagcagtggtgaaccatctaaacctggttcctgaaaccctactgtatagcaagatgctttctaatggatacagacataacactggcctctctcataagagtcaaactaaacacagcctgtcaaccaaatggacaaccaaaagtccctcaggaaaatctgtctgttctaaagacttatgtataaactgtagataagtgtcattgtccttttgtctatcatgtactctcatcccctccagagtgtgttttatcctgcaataaactgtcttctacaatatgctgtctgaattcctttgatggaaagtacaggaatagggagctggagtgttatccttgctacacttccttttatttgtttgttgtgtttgtaggtgtaaactgtgtaaaagtgcaggtatgtaggggaagctgtagccacgcctacttagagtctggctacaggtgtgcctgaccaccctttagactaaaaggggaattgtaggggaagctgtagccagctcctaagtaggcgtggctaaagcttcccctacacgggtacatgtgcctgtgtgcacatatgggaggtgggaaggggacacaggtgtcttcctctatcatcttccccctgattaccttgagataaaattttgcaccgaactgaatcccactgtttcttttggtctggttggctggaagccttgcttctaggaccctgcagtgctgggtagccatgcccaactttccatgcaggtaatgaagactcaaattcaggttcttatgctagcacaggaggtactttagccactctgccaccttcctggtgttctgctagtctaaaaagcatactgaatgcagaacaatcttctaaattgaccatgccctccccttggcctgcccaataaagctgggaacactatgcttttaatgtgtgttgtctgtctacagcctctacttagaaacataaagctgtagtcattttcaaagtgacttgcacaaatgcagtaaagcactggaaagtttggtacagtaatgtatcaaaggtcaagcctctggaagcagagatgaatctcagaaaagtagaagaatttgtgacctatgccccaattatcatcctgcaatctgttactggatagattcacagagatggttttcagtcaatccttccctgtgtcttttaatcacttacacagaaggcagattaaaactcaaaacaaataatgtccaacatgggaattttcactagatcctcaattttacaacacttcgtagttgcgcctgatttgaatggaagccagagttcttctctggttcctagcagactgtctttagagtttagataaccctggtgtgctctgaggaaaacaaacaaaaaagtaagccacatagcacaaaacagtttccactctagcattttgccaagaacattcagaactggcagagcctccgatatctcaaagatttccaggaaacatcacgtactttcagcattacatttggagtgctgaaacattttcggcattttaattgtcactgtcattctcactgcattagggtaaggggtggccttaaatttttaacagtcccattctcagacacaacctccctatcaaaactttgtgtgtccaagcggccagataccccagcatgcagcatctctattaacacatggaggaaaagctagtaaatctgcgccacgatcggcccctggtggtcacagtgcatgactcccagtaagttgtgagtgagtgagtcatcaataggcttgcttatagaggcccatgttatagctaaccatactatgtcaccactgttggagatcaaccttaactagaacatatttttctttctttcccttgcctacatctcgggtgagaactgtgccttgcccatgacatgaactttatttagcttgtgctatgttctacatatttaatttacatttaattgtttaattttttgtgatgactttgtgatagagcacttgtaggtgttgtgattccataagtgtacaagcatttgcatgtatgtggtcatgttcgggtgtgtacacatacgtgtgcctgtgtttgtgtggtggcctccagttgacatcttgtgctttccttagttgccctccacttgattttctgaaacagggtcttttgctgaaccaggagcttgtagcttgggctaacccagtgagctagcttgctcttatctacagcctctgggcaagcccactcaacttgtctgtgggttctcatacttgctgggcaagcattttatccaccagccccagcaagaccctttaaataaagaaattcaagttgatagatgaagtgatctgaaaaagaagagtatatggccatcaatattgatattctgtatgccaccgggctgccctcaaacacctagatagtggagctttctggaaggggtataggcaaaacctcttccctttcactgctgcttcataaacttcctccatagaactcttcttcctctttcttgtacgaaatctctcgctgacaccctatttccttcaatcgtgagaatggctcccttttaaatagttaagatttcccaaaatgtttataatgtccccctttccccattccatgttctgtctggcctagggaaagatgcacacctgccccctttcctttgcttggttatgttttcttctcttcaactctgttggatcagggtaaagatcttaactaattagttgtggtgtcatgggagttcaggttaacatggacaatcaaagctgactatgtttggtacaactgtcaagaacccaaaggggcaccttggtgggaagttctttaagtgtcccccttaataataggggtagcgaggggtgaatccctgaagctcggtctccatctctgtcatgcctagaccctgtgctagtattttttgccttgacctgtgatcttgattgactccaagtttggttcccagaaagcactgtcaacagtagagcaatgggattttagttcatccacctttcttatgtcacctggccaaaactgctagagttacagctgttgttgacttttcaggcatctttaattgtctgaacaaaagaaaatgtggataaaattttgtgattctcgattaccttcgtttacagaatgtggcctttggaatttgtatttggggtcctacccacttcctctgtgcatttttagactgtggccttatttagaaatgttgattgaaagttagagtagttcaggtaggatggggtcatagtgaaggagggtggccctttatccctgacatcatttgcgttcttatgaaaaggaagaaatttggacacagactccacatggaaagacatttatgtgaacatgaaagtggggtttagagtgacatagttatgtcccagattgacagtaaaaccccagaagctggaggagagtggcaggacagattcttcctcctcctccatctctgagaatattttgagcttggatcttaagcattctgaactgaagcaacaggattttcaagccacctagtctatatactttgttataccagtcttaggaaatgaatatagaaggtaataaatatcctgtgctctcccaccaagtccacatgggtggaaatgacacagaacgacaaaagacttcaatctaagtttaacttcttagatcatctagagtagtgcctctcaacctgtgagtctcaacccctttttcaaatagctacctccaaaaatattcattacaattcataacactggcaaaattgcagttatgaagcaacaatgaaaataactttatggctggggatcaccataacaagaggagctgtattcaatggttgcaacattagaaaggttgagaatcactacctaggggtagatgaacagctgaaactgacagaacagattttaaaaatcagtcccatcataagccccagctgaatggtctagagagtcccctttgaatgcaaggctgcatccaagtgaatgtcattcagttagtgagtggggatgaacatacaaagtcacaactttgagtcatgatgcctggggtttagggtactttttaacagtctttaaaattgtttatgcatttgactcttttgcctgcctgtaattctcttcaacttgtgcatacagtactcacagaggccaaaagagtgtgctaaataccctggaacaggagcaacagacaaattataagccgccatgtggtcactcggactcaaaacaagtgcttttaaccatggagccatcttaccccttttagggtcttcttgctcctttgtgttttaagggaggaataaaatatctatttaattatacttcttaaagatatattgatctagtagtcttaaaaaagattattattattattattattgtgtgtgtagatttattattattattattattattattattattattattattattatctttgtgtgttgttgttgttgcccatgtaaaaagagggcattggatcccctggagttttacctacaggcagttttgggcttcacttcttgcaagggtgctcagaattgaacctgggtcctatggaaaaacattaagctctatgcacctctgagctatctctccagccacctagaattctgttttttttttttttttaaacgttggtgtttcctgggttttgagtaagtgggtatgtcctttgtgttccttgctgagagtgggtaatgggaagtgtggtaattaaattattatataatttgtttgtgtacttattcttgccccttttgaagctgttgcctcatttttattaacattaatctcattttaaagagagatctaaaatgcagcaaaactgtgtatagaaatccaaatgatcccatcaagaacactgtatttgaaaattgtcattttcagtattttctggattccagcaagtaagatctaaaatatatagagcatcctaacttgtatttgatctcagggtttccatcagatgggacgataatctccaagtgtttaggaaacattatatcaaccagttcaaaatggttccatgcctagtgcaaaatgattatttattgccagggtattttgctctgattttcttgggttcttatatgcaactaaggaatggaactccttaattattctcattctgtcaactcattctgacagtcattcattctgaaaattgtcagactgaaaagcaccaatcccctggttggaatcagctacatacagctgatttctctgatagatactgcaagacaaaagctaggcttttatcacaggtaaacacacaccaaggcagggctgaggcagtcaagatgcaaaatcttttctcttgtgagtcaattttattccactgaccttatttctgttattcaaaactagaaagatgaaactgatgaatatttgagataacaaatagctctggtgccccgtatttcttctttaaaaggcgccatggggtgggggctctttttaagaatcacatatggtaatttattaaaatacagacagtccaaaggagaaatacctttgaggaaatcccaactaaaccagacagatatcagacagcataatcagatccttccctcctgcctcttcttcttccttctccatgtcctcccagtcctccttctattattaatccagtgacttctgtcaaaaaccaggaccatggcataggagaggatatggtttcccatgtgcctgcttgcatgtgagtcttccaggaactatctgttgattggatttggctgtgttttcaacaaaagcctagaattttagcaaataaggagcttggcaggatggtagggaaacaacaacaacaaaattacaataatctgcttaatcttattgctggaagcagactcggaaggggagtcaaggaaacacagagagtaagaataatttagacaatggaaaggaaaaggcccagtgggcagacaaagggttgagatgccatgtaaaaaaactgtcagggaagaacaccagagctcttagatttaagctttctggcaacagggaggaaaagccattcactgtagggctggcatggaaattggtctattttttgtttcttatttttccaactatttccagttccacatgagttcatatgtaacaccaacttgtatattaacaagcctcctaatttaatctgccttaccaaatttaattgggcttctaagccttataggtattgttctatctatttagtttgaatgcacaatttatttaccggtcatcaataggtgatcagcagctatcttggtgtaaaactcaggaaaacgttctgtcttctcctctcttcatgcactagcagcttactgggcatggaaagataccacatagagtcaattagctgtttcaaacttagggttgtttattaaatttatagaatatggttaccaataagcataagctatcactgtcattttacattgggcaaatttgcttcaaaataatagctagaaaaaaaacaaagcttcaacctttctgacaataattcactaagagggaggtgatgaaggttacaggagtgtgccaacatgtgtcacccagtaccatcacacaggtttttattcatttggcatcattgagatgaagtcattataaccaaaaactttggaaagaggctttggaaagaggcccagtcttggctcagtagtgttcagtggagaaagttcttcagcacccagtgtttaacagcccatgtcattaacctatcactgttttgaaagaaatcagcttctcagggtcataggatatttaacttgtacccccatgctgacagcattagtagagaggtatcagaatgtgcttactggaatcaacttccagggagcaagcactgcaaataactgtccgcttgaagcactgggtgttggtcccacctgtagcatggacaagtgtggttctggatgagttattgacacttggtctgttggtttgtttgaaataagccccccttccattttacacattttcttgtgtatcacatggaaagactttggtgtaatgcataacatacatagatgcaggggtatgagtgctgggctctgctgcatgatggttgtgcaatttgaagcaaataatggaacttcttatgtgctcaatggagacattgataaattcaatattatatcttctacactagttttgaagattaaatagaatggtgcctcccatgtagtaaatgcttttatatttatttatatatttaatgcaatattttccatgatgtatcctctatcagagtaaattactcatctactttgttgggaacatagtaaattgaatgctgtatttatataatttatatttaagtcaaaacaaaaataattgccagtggccatgtcagaagaggagcaagtgtcagcctaccaggaagtaactccccgatgggtgaatctctgataggaaagatcctgagcccatagagtccagaatgtcttttgctttttctgtgctttttcctgtttgctggttccatctttctctagtctcctgcatggtgtgaatgggaatggggagaatcccatgcctgtaatatagtgtatccacctagttctactaggtattcttacctgtgaatttttatgaagatgattccttcctaagatttactgactaattgataatgatgttgatttaaatagagttttgatggttaaaaaataaaacaaggcagtgtcacacagaacacataagtgtctattgagaagcgaatggactgtggcttaagttaatgatcaagaaaaacaattgagacccagtaaccaagctagcataaattcttttaaccttaaaggaacagagacagcatttatgtgtttagaccctcagaatgcttttaaatacaagaaaaattgttattatttttgaaaactaatattttgggagaaataatttgtggataacttattctaagattttccattaaaatggtatatattgttttgcgctgcctggggcaggggtcagctcccaacagcccaggactcaaaaggaagccacagagtacaggcatactaggcttttttatctgatggggttaagggaaaaagatactcacactctctcttgatgatttccttcttgattcctctatattcttcattttgtgttctagattccattttatctctgtctagaatgccccttctttctctttagatcttttccttcaccttccaactgtcttgatgttctcctcctaattcgttcattcttgcaagatgttttccttctaaccctatctttatttttgatgtttccctcattcttgctgttttccttctagaccactttaactctatctaactctatctctagtctttcctttaaagcttatataccccagcaaaatctttcaagcaatataaaaatcacagtgtggttacattctgttttccaagtgagtgaatacaagtgaacaacagcatgttttccatatcctttacatgattaaacattttctatattacagttgaaaaccaaattatcccaagaacccatgtacattcatacccaggcaacttgtaatagattaaccatgtaggcaagtaagaccttttcagtcatgtcttttactggcaggctgcattttgcagttacaaagaaagggtcaattactttatcacttatcttgaaaggtagccttataaggaatcttaaagaaatcacaaacctaaacttttatacatgaaaaacaatcagtcagatctatcttaaatctttaggatgtatacccactcataaacatatatatgtttgttcaggagacggagggcagaaatgggtataaggaattaataatcatcaaccaatcctagcaagaaaagtgaacagctagtcataatagagcttctttgttcttgttctctgaccttaaaaagttcttcattcaactatgtgcctttctaaaactctagaatgcaagtttcaaatagactccccatgtctccatttcatctattggttacagttcgaatctattctggagaattactctgattgctaaccatatctctacatattattcatggaagctcactgaattctatttgcattttcaaaagtattcattgataaactttatacatttcctcttcagaatccctcagtatatctagcaagcttttagctggtagattggaaccacagcttattggaattaataccctagagcactggtatctgaagggaaaatttatgctgtttaaaaatgcactatctctaattgctaattttgtgtcaaggttgatttgcttaactaagttggaagtgtcttgaggacaaatttcatttcataaactttggccatagaccaggtctccatcagaaagagatggcagattttcaatggatgtcgtaagatatcccgaaaccaagagcctccaaagagatagtgtttattttgcagtgatgttagtcaggagaatgtgggctttgggatcttaagtacccggtgtttttcagtatcttttaaaaaattgaacaataatctctgaatacctgtttaaaactctgtgataaagattagaaagcaatatagaatgaaacgtttctctcaaagctgattgaatgcttaacgggaaaaacaataaaggtggggggcttccctgatgtagagtagggaaactgggttctcatgagaaattattgagctgttcactgtgtgctgagaacacccaagcatcctgaagcaggtccagtgtccctgggtctgaagagagttacaggatgcaggggtcctgtttcactgttgattacagttctcttctgatgtttttccagctgctgctccttggcaccgccctctgctggtgtttgctgtggacattctcagctctgaattccctcccaaaactctgctgaggacagcactcacctcttctctctcagagctttagcatcgtggtttttaatgtggcattttcatgaattctttgggaatttcgtttgatatgttttgatcacattcaccactcttctttccaacttcagaatgaatttctatattttcaatttaatagatttctatttccttttagagcaaaaataaatatatatgttccgtgtaatccatgttgtaagtcgtgtgtgtgtgtgtgtgtgtgtgtgtgtgtgtgtgtgtgtgtgtgtgtgtgtgtgtgtaggtaggtaggtaggtagttaggtagttaggtatacgtgtgttctccatctggggtgtcttatttccagcccatctctaaactgctctgttttcttctcctgtcccttaacttctttcatacattattctgggttcatgatcatcaaaaatcttgtcgtcatctctctagatctctcagcctcttcatacagccccccaccggacatctccctttgcatctgctgttcttgcttcgaatgttcagagctcacttcataaaatctttatgaagggagcccccatgaaaaatgtttctgtttctgacactggcacctttcattgtcattaagatactaaacagccgagatgcactgcattgagaacaccagctgcatcctaacaccttttgctgagtgaagtgtggtataaagacagacagctctgggttctcaacaattcatgggataaagacagacagctctgggttctcaacaattcatgggatttgtcgtcattctcactccaggatttgtaaccttttccttactgctttggtttttcctttttgtcagatgaaagaaatgaacccatctctcaaaaggccaatatggcctttgagatggataattcagaccaagagacgttctctctagatgtgtgctgagcctggtacactgctgtctgcacacatttccgagtgggaattgtttaaaacccagctctcatataggtatggccctacattttagtaatcaaagttcctgcagaaaaaaaaatcatcatatggaaaacaatactgactgagcaaaagccatttttatactaatctaattgagtacaaggaggaaggaagaaaactcatgccgtaactcattataggtgaacattccatcctattacatctccaatgacgctatcatttcaagttccttcctttgttttcattccccctaccatcattgttgtccactttgatttaaatcttttgaagttcccctcctcttcatctcagcttggctattctggaggaaatagcattacttcacaccagagggaatgaaaagtatctatacaatgattgcaatttaaatggatggaaagaaatatgattattagtaagtggaatgtgtaagaaatcacatttaattgactttaaatatttttattatgtggcaagcattcttcatggacttagagtttatggcctatcatgtatttccatagcctccagttaccttttcatctggatttgaaaatgtggtcatttccctttctctttctgagcagtggtgaagttgaaagtacatcaggacagggattaatggaaatgagttgatatcattattccacaggcaatgaataataaatagtttgtaggtgatttacgttaatctaaatatgagacagacagaaaattatcctgtgctttgcagtctgcccagcaatgctgtcatatctggaagcataaaattatccatatgtcttctttcaaattaagccttaatttgtacagtcagtcaataacaatttggttttgtccataattcattgagttggtttgctatgatgtcccaataaaatgtagcccaggtttaaaaaaatctaaatattgtacataataaataaaataatttctttattcataactttttctaaacaaataagaaacattatattattatatctacttatacatctttaagatttatatataaaattgctgtataaaatacagattgaaatccttattcagacctcttctgaccatgtgtttaattgtttttaaaagaaaatatggttttaaaaataatctgattgtgggaatgcagagtttcagaaatgaccctgttctctggagcattcattggggcgtgagtgacccatttctcttgtgtcccagtggagacttctttcaggacattgtgctcaagcacaatgtgattgcttgtgtgtcatggtgggaatagaacagagatggcgagtataataataaaagaggaacagcaaagtataatgatcgggagcttgggttctgtgttcagaggtgtgagcttgaatcctgactttctcatctgtgagcggggcaacctgatgccctgcttgctatgcctgtttcctttgcatctataaatcaatgatgataatgctagttggttcatagagttgtttgataattatgtgagaaatgtgctttgtagatattactgcattgtcattgacagattcttttcctgataatgatagcttgtgaacagacaagaactttcaatactgtggtttcataactggtcacctgcctatctgcactactagtgctcgactgtgcaagaacaagagttttccctttaagctccagagccctagcattcagcaccatttcttatgtgtagtagccattgataaatgtgagtttctcaggaaaatttctaaaacacatatatattaatgtgttttaagatttattttatctttacttgtgtgtgtttgtgtgtgcatgcacgcatgtgtgtgtctgttttaggggtatgtacagattattcaggtgtctcagaaggccagaagagggtatcagattccctggagctgaagttgcaggcaactttgagctgcccaatgatatgaatattgggaactgaactccagtcctctggaagggcagactgtaggggacagtaagccatgcctgttagaggctggctacaggtgtgcctgatcacaactgtcaaggcgtggtcaaggtgaggtcaggatgatgaggcatggtctcttatggccacaatagcagactatgctttcttatccactgagccatctccctggctcctctaaaatatattttaaattaaatatatctttaataagttgcaaacttactgcatggcattctatatcgaaaagatatacacaactacagacaagttttaaaaatgagcccacttagaaccctgctatccagacctcaccattcatatttttattgtttttgtgcatacatttcttttttgtataacaaggcaataaattgcaccacaaactttttgttgtcttctttgttttataagataacaggcataatacatagttattcatgtaattccttatttttctgaaacaccatttaaaatagtataatagatattgagcagtcttaatttggaaatccaagctgtcccaaacctaacactttcataatgtagccgtgatactcaaacctttattttattgtttttttttttttttgagcagtttggtttttggatacttggattatgaatgctcaacaaatctcaaccatctcccattcctggcccacaataacaaaatcacatgtatttctagtgccagacatttataataatgtgtaaatcatcttatgtttatgtttgaacctttaggctatattccaaatcatgtttctaactcaaagacactgctgtggacattgacactttctgtctgacccctcccctctccctgtgtgctctcttcttaccaagttgttactactctctagcacccacctacataggctcatctatttctttgtttagttccttctcagactcctaattctataaaaaacagaggtcctatttttaccactgtaactttagtttacaagtctgtttggctcagaaacagtgctctgtgtattatgtgaccaaatcaaaggtattcctgtcagtcatagggtgcaactagggtcctcaggatatcgatatgatgattccctgcctagagctaggccttgcctaggacagggtctaggagcaagggtgtgaaacttgtctgtgagggggaacattgaggagttagctggggcagctagctggaggactggaaaggagaatctgggaaagggagtatgtgactctcagttgactcatccttccccttcattttttccagtaagggctttctttcttccttgtgacctttagaatcaaattcttggaagcaatagggagaaacacagaacctctgtttgtctgtgaggtgattaagtactgggtgtgtgtacccttatctgggacttctgaattatattcaagaaatcaattccaagattgcaacatgtttaaagaaattcttaatccgtgtctggcatgtgatagcagggaagaaaaaagaaaatttatatagtgcttggtgcatatgagggacctttgcgcactattgtaatctttctagaaaccagagaaatcaagaatagtcaaggaggagggaggtaattaacctgagacctctccctgcagtctcaatattaggaaaaggaattctctggtaaatgaggaaatgactttcagttacttgtttaacagtgagtctatttctatgattgcttaggtatgcttgggataggtctgatttgcagattaatttagaatgtacaaaataaaaacgttaatgctggggcctatggagatgcctgagcaggtaagatcatatactggacttgtggaggacctgagttcagttctcagcacccacacacaggtgctcacaactaccggtaactcaagctctaggagatttgacaacattgttaggatcctgaagactcctgcactcatacatgtatgtacccacccaaccctgcacatatatgtgcatttaaaaataaaataaatctttaaaaaccaagatgctccaccaaggtatagaaataaatccatttaaagccatttataaaagtttaaagtacatctaaactaaaatatctttattgttgttataaattatgttcaaagaatattaattaaaataaatgtaccagcactttaacattaatgaagtaacttcctgttttctattattacttttttctctgttggggggcaggtggcaggttccccctttgcagcatagtctaagtttgaattaggaaagtgctaagatgttaggaatgagtcactaagcctggcactccctagcattgggaacaacttttaaccttaatttctttttgacttggccagaattatatgaacataagaaattataattgttgactttattgttgtttttagtttaaaattttatttatttgttttgcatcctgacaagttttccctctctcttctctccctatttcctcccttcttcccttaccccctccatccattcttctgtttctgttcagaaagggggcagacctcccatgggtatcaaccaagcatggcatatcaaactgtagaaaggctaagcgcctccctttgtattaagattggacaaggcaagcctctatgaggaataggtttccaagagccagccaacgcatgagggacagctcctgctcccatttttaggagtcccacaagtagaacaaattacaaaactggcaaatatatgtagagggcctaggtctgtaatatgtaggctccctgaatgttggttcagactctgtgagttcttataatccaggttagttgtttctgtggcttttcttgtggtgtccttgacacttctggctcctacagtccttcctccctttcttctgcagggttccctgagctcagagtaatgcttggctgtgggtctctgcatcggtttcagtcagttactagatgaaggctctctggtgaattccatacatgaacataatatatgttggtcacatccatcccccaattttatgaacttccttcatgtcccagatgctctttccttttctctccctcttccttctttttttttctctttctcttttttcataaagaggagttcaattactgctatttaaatgtacatggatttaggaccatccatcaaaatatgagcaacccaccagaagctacatccctaaagaaaactgatactgtctcttccagtagccatcaactgtcaatagctcttcagttagggatggaaccctataactcctgaatactccatgctgtaatgttggtgggattgatcttgtacaggtcttgtgcacgcaacatggttgctgggagttcatgagtaccaagaccctgtcatgtcctgaagtcactgtcctgtggcagttctccctgatctctagatcttacactctttctgtcccttcttctttaaagacccttaccttaaattaagaccagaaaaaagaatccttcatgtgtgtatggtgtgtgtgtgtgtgtgtgtgtgtgtgtgtgtgtgtgtgtgtgtgtgttgtgtgtgtctgttaacaagttatcagctggcactatggaatatccaggcctacttctacttacaggctttaacaaaaacatttcttcctgctggaggaaactgctaaatttgtaggtgtaatagcaggtacacaattacaaattctctcagtcctcaggtcaccagcttgtggtattcagtactgtcctccataagggttctaattcatttttccagcagtttcttgtcctacacatttttagagcacagttttaaatatataagaaagctgagaagcattaatagtgttactagaactttgtgtgtgtcctggctcctggtcaagctggtggatgctgagttggaatagcaccaggatgctgattggacagcatggagacgggctgggagaacttcttgtatgattactcttgagcactctcccaacttctaaagtcataactctggaaaaattcccaagttgtttcatctcaaggaaaatctttggatgctggactgagtttgagtccctgcatgttacatcattttttttttttgaatctcaaaagccaaatgtctggaggcagacttagctgatttgcttccaaaaacacttgagaaaattattagcccattctatgacatttcagtgaatttatttagtggcaagagaagtgtgttatttttaaaaagagatattcttactattgggagaaaactatctcttaaaaacacttatcaaatatttgcttttactcaatttttattttttataataagtagtaaaatctacagctgtgactgaatatactagactatatggcaatcacactagaatatactaggaatatgaacaccagagtgaatactattaagtgatattttatttcctctatacacatgtactcctatccacattttaattactgtgatggaaatattttaaagttataaatcagcacagtgtggaaatatttttaatttccatgcttttttaccttgtccatgttcacatatttacacagttgtattaataatctctataaaactcaatgtttctctttttaaaacttaatagcacaccatggaaaatttctacattattatataatttatagttataaagaattcatggtttctattaaaccaatattccagagttgagttaatcatttccttgtggagtaatatatttatgatttaatgaattattctaaatcaccccaaaaatttatagtttaatttctttcacactgaaggcttgaatgagtctccacgatgttgaaatgttgtagtcaccacatggtcacataagccctgaaacgaagctgtgtggagaggcagacagtcagcttcagcttgactggcagttagtggatacaccaggctctatgtccagcctaagaaatgcaacttccaaagccagcaaatttgcagaatagaagatcatgggaaaataaatacctgtccaagtgttttgatgattcacacagggagcttggttagattaagatctaaagtctgggttttacttttgccagtagtggatttaatgactgatgaacggatcaagtctgtttcagatattttgttgacttgctttaagggctgtctttcatcagtgaaatctgatgacagaaatttccaatacaaaactccagcccctcttgtattgtctcacgtggtgagaagctgccctccaaggggagtctgagaaggccgtgttggcacactgttgaagtgttttgtgacagatagtgtcagatgcaagttttcagtgggcttcaaagaaagctctggattatatcaggctaaaaatcaggcttttgtcaaggagttggagttaaatctttcctgggggaaaaaaaagattgtaaggttggcagcccatatccagtctgcggatttgaactatcatgttggcaagaagaccacaggtcttaagcagatgcagctgcaaggttcattacacattgagagcctgtcaaactggcagaaagaagaaaaaaaggtttctgcattcaacctgtggggttttggtcagtcaaagcccatgggtgcagtatatgtgtcaatcctggctgacagggcaaaccactattaggcagggtagggtctttgcagacacaaggaatagggtttctaggaatgttagatgctctttctgttgggtgatttgtgcctctggttggcagctctcatcctggagcatgcttggagtatgccttgcttggaaatgtcagcggccgcctcatcagacagatgctcctgggatgagtcaggtgttcagaacgcaatgagaaatactaatgttcttttcctgacatttttgatggaatgggacagcaaggtgatattgttcctaagaaactggatcatgatatttaagtgcagaaaaaagtgaaaggaaaaaatatgttttctcctgtggagtgtaggacgtgtccttcttggtggacacttgatcttttaggtgaccgcctgagggactgtggtctagaatatgctcatacacaatgagaaaaatggagcatgagcataaggagctgggcttcctcccaaccctctcacttagtttgatcttaggatcagttagtgaaactctgtgatgctgtttccttatctatattcgtggagttcttgagaaagtcaagtgagacattttttacaaactattcaggtattcactgtctggtctatgcaatgaaatccatgatgtcaatacactggattgaattaggagataggtaacttgggtccattttctagagagatggctatgaaggatgcactgttgtattagtttactaaatcagatttatggatttgtttgttgctaacatctcaaaagaatacaataacattttagagctaacagatttcacacaaaatattacatattataattttctgaaagaaaggaaaagggggtgttgatagcagatgtggcaagtgttttatcatcctagaaattgttggctcttttagaaaaggtctcctgctttccatttttcctccattttcaccatcctcattaacttcggggaccaaatgtcagttggtccttatcagttatttctttaacagtgtctcttcgctctttaagtaaatcttgtttgaacgatctgagcatcaaaccaacatgtagcctcaaagggtgcactggccagatgttggtggcacatgcctttaatcccagtacttgagaggcagaggcaggcggatctctgtgtgttggagaccagcattgtctacagagatagttccaggacaggttccaaagctacacagagaaactctatctcgaaaaaccaagaaaaaaagggggaggcgcagtacactgatgtggacatttcttcgggtaaatgattacttaggctgagatctagtcttctgttcaaggcgttaaaagcataaatattctatcagagatagtcattcctgcaaagtactgcttgccaagataagtagtcattgctcctaagcatgggtagtttaccttagatgaatatgtgtatttgccagaagatacttgaacaaagcaaacaaacaaataaaacaaaacaaaaaccaaagatggactgtgttaccatttttatttaggtatttatttttgtgtttttatgctgttcccatgccctacttatgagtcagtaaggcaaagtttgggtgtgacaacagcccaaagctctcagtggcttttaagctgttgtgggcttggtggggctttggtaatgaagcagagctgacagaggctctgatttcatgcttccatgaccaatggatgggggaaagaaagctatggtgtctaatggtagcagtttaatgcccctggccaaaactatcacaagctatggctacctatttcattatcaaccaaataaaactatgtgaccacgtctgagttccagcagttagggaaatggttttttttttgtcatgtgaatgaagtgaggcttggtgtatttgggagtatcctctgtgagttctttcccatatcccactcaggaatgtgcatacatcaatgctcataactgtccctggattgtgaatagcagtgtgtggcctcctaattcatgcatccttccagccaatagcaaaacctaacttttagtgcagaatatttgagtcatgccactttgtctggggaattattctctccatttatgccactcatttctctgctcttgagaacagtgctcatttacttatatttatttcttgcattgcatatctaatttagtgtaaatattaagtttccagatggtcagaatttaactttcaagttctttaccactgcatagaaatacatttaaatgcctgttttgccattaccactgctaacagcataatgttctaaactctcttccccacagtgtgcaacataatttttatcacaattgctaatagattttttgtgtattatttctttaaatacagttaagtatgtagcatgaataataaaaacccagaaacagatattttggataaaggtgaaaattagagaagcaaagcagccagccactagagaattcttacctctacccatgcttagaccaaagggggatgatccaccaaacctcagactgctcccgactgcataaccccaacatttgtctctgggttttattattaagaccaactagaattcatgctgcttaaatgctatttttagtaatgcaattctattctaagagcatttaaatctccaaataaccatctgtatggcgtgggtagtctatgctgaacacatagtaatgcactcataaatttagggttcaggcagtcagatctacctgcatttgttgaaatggatggagagtttcagtttcttagcctgtctttaaattcaacacatgagggcaccacccttcagtctaactgatctcactattccatatccttttgtgtttaatctcaagcatgaaattgtctcccttctataagtcctcttctgaaaacatgcatatatttcattactcactttgtcttattggtaatgattctaatataatatccatacttttagtaaacacatattatagagtacaattttgtaatgacaggcacaatacaataaggtagattttattcatctttcataactgacattttaagccctctggttgatgtctttctcagccctggcaactacaattctaaccccaatctctaaggatctggctaatttagattctttctttgggtaagatcatggagtattttaccttctgtggcatagatcatgtagagacatcttctctaggtttggtcatgttgttgtagctggcagatgtccccctaagggaaatgataatctgttgtttgtatagacttttttttcttgactcaattgtccatccatgagcatttaaactgcttccacatgtttcattgtaggttaacagtgcagttaaaacaggtatgtatcaatttatttgagattctaatttctaccccactagttttacacccagacataagatgtatatatggtatatatggagtacacatgtgtgtgcaggtatgcttgcgtgtgtgtgctcgttgaaggacaaagatctatgtcgtccttactcattttgtaccttgtattttgagacagtatctttcactgaacactgaccttgctgattcagttacactgacaggccactgagcctctaagatcctcctgcctttggagcctgctcccaccatcctaggcttacagactgtgaggatacctggggtcttgggagtcagtattttacccactgaaccatcattctagctgtgtttggtgatactgttattttctttttctttctttttgaaagatttcatcctgttttccatactggcaatagaaatgtatatttctagcaacagtataaaggttataaaatttatacttctagcaacagtataaaactttcttcaaataattggcaacatttgatttcttttcaataatagccattttaatagggatgaaatatccatttggatttcctttctggttagcctcattgaacatattcttcatgaacttgttggccatttgtttttctgctttggagaaaggtctattcgaatccttcattcatttttaagattcatgtgttaatttttctgccattgccctgtgagaggtttttttttatgtaattaagaccttaacttcttaccagatgtatggtttgtaaatattttttcctatttcaatggcttactgtttcacctgttgattgtttttcatattgggcagaggtccttttttcttgcaattctacttgtcttgtttttcatccccccctgcttttaatgtcctatccaagaaagtaccactaaggccattgttagagttttcccttgtatattcttctaaggtgtgctgcttgatttctttgtcagcttgacacaaacctggatatcctttagaagaggaaatcacaactgaggaattgcctccatcagatagaactttggacatgttcatggaggtgctttcttgatgagtaatggatgtgagagggcccagcccaccatgggcagtgtcatgcctgggcaggtggtcctgggagatctaagaaagcaggctgaaagaactatgggagcaagccttaagcagcacttctccctggcctctgctatgcttctagactcctctgcctgtgcttgagtttctgccctggctttccttcatgatacattacaagctataatataaaagaagccttttctttcctaagttgcttttggtcatggtgtttatcatagcaagagaaagcaaaccaggacataatgctttcattgttttatgttttatattgaagcctttttattttttatttaaattagaaacaagtttgttttatatgtcaatcccagttccctctccctccctgcctagtatatttgagttcttagttcatcttgttttgatttttgtctacatcatgagaccataagtaaggatgcccatttttcttagcactatttattgaagtggatgcctttctattgtatattcttaaggtatttgctaaagatcagttgactcattatttcatttaaaatattctatccaccttcatacacagcaatcatattgtcattacttaaccacctcagaccttagtttttaatgtatactgtttccagttttaagaggatttaaatttctttgtgtgagcccctcggttctaaataaaggatgtctctcctttgtaattcgtcagaatcaatcagcccttgacattttacatgaaaagcaaacactacctaatccacattgtaactttgcagttttgtaaataagttagcacattcttgagggctaagagaaatccatctagggatgagatgaccacaagttagtattaacacagactcacatgagtaaattcaatgatatgaaaacatttgctaagggaaaatggttacttaaataaattactattgttggtaagaaacaaagtagagatcttagtgaattatgctggcttgaactatgtttttggaaatggttaatagtaaaatacatatggatttaataatacaataaaaagacaacaaatccatctcataaaattatattctttctaaaaacatctcaatgaataaatttagatgtctttcaccagagttcaaacgccaatggtcagtgttgggttccaggcattttatttcttctcagcaccaagggtactaaatcaaatgtaaaaatacagccagagatagtatttttggaaaattaaactttggaaaattaaacctctcttgaaagaatctactccggaattttcttattaataaacagagtgtgcttggtgtgctggattacattgtgcaggctttcccatggacagcgcccagtttgaatgttcttttcttgaacacataaacagatgtgcacaaattattctttttttgccattttatttactcaaaagatttccatagaaagttttccaaataaagcattgaattcagaaaaaaattattcagaatgcaaatgtccccatttgtcttgattcacccaacccagtcttagccctattccacattccagagtccacattgctaaggtgtaacacatacatacctctgtctagtataaataatcacagtgacccaaatatgagaaaatagttcttcatgaaaatcagttttatcactgaatacttgactgatctgtctgtgttcaattttgaggactctacctgtgatgagagatctatcaccaatccagacaattttccagtgttttctcatcttgtgtggcaaaagtagatgacatttcagtctttcaggctgacagactttggatgacttgtctgaataacttgtagatactgttttaaaattgcaaaatgtcacttttgtttaattgttctctacttcatcctaaagccatctcccaattccagatagtaattattgtgtccttgtcatactggttatgtgctatgataggtctacacataaatgttagtggcccatcaggtggctataagacacatattttggcactggatttattctggaaaactggagattgtgtgttctgcatggttagccctttctagtaatctacatcaatggaaaagccatttttgtgtatcctgtgccattcagatctttagaggtacatgtcattcatgtcgttgtctcccccccccccagttatcaccaatatgcccatgtagagactttccatatagcaacactctgctaaggcttcaatttttgcaataataaaaaactcactttattttacaaaggaagcactgacatctttttaccttaaaatcagggaaatttatagaaagagttaaactaactatagttcactttaagttttataatcagagaccacacaacatgatgacattcaggtttccatttttatacttctgaatagattgagacattgtagaactgaaatttagaaaagttggtggtttgtggatttgtggattggcagctgactgttctcagcctctcagtgaaatggttatttataactgctgctccactgtgttttgttttaggttgagtccaacttacagtttccaagactgagtactgtaaaatgatgtaactaagtagtatttttgatcacatgaatactcctgaaaccagaaatttttttcatagaaatattctcctttgtctagtaggcaataccgttctgttttcttttgagctgtaacattttaccaagttctgactctgagatactttcttgtgttagactaaaccacacacacacacacacacacacacacacacacacacacacacacacacacacacacacacacacacaccacacatgttttcacagaaaaaaattgctcacaaaaagttctgcctttggagaacatgctcctatgttgtttttgaaatacagtcacatagaaggcatctgagtgcttcctccctgatgactggctttcatggtaccataagatatcttgcaaggttccaaaggagggaagaaaccaacagttctatccaactttgatgcctatgagccacaacaaaacccatcatgacatgataaccctaagggtgcaatagtggctcacataccttggtggtaaccaacaagtctctaattggacttaaggccacctcaacaagagggaaatcattcctggtgctggaaacctagctcacaacccagggctagtgcagtcatgggtcttggagaagagcatataatcaccactttaccaacataatccttaactatatgctcaatatttgtccttacacccacagaaaagtgtagtcctcacccctcatcaaggagacttctctttgcaacagacagagatcattacagaaaaccacaaccaataaaaatgcagaattgtagaatccagtcccagtggatacatttacaaaacagtccagcatctaaggctcagggaacattgaggaagaggagacagaaagagtgagagccagaagaccagggaacttgctgtgaggttgtgtttcctagtactgtcaggagctactctcataaagtctcactaacatgagctgagcaaagactgcaacaataggcatgccaaagtgtatgggagaaagctcacacacactcaactctacagaaagaactataggcaactaagcaataagtgagtggaagaattagtctacatcagggaagagaataccaattgcttattcaatactgaatggctagccctgaaaacatacagacaagtaacattatacagactgagaaggttatgtttaggaatataacacacacacacacacacacacacacacacacacacaccaaataatgaaagaaggggccatgaatttgtaagagagccaggaggtctatataggagggcttagaaggatgaaagggaaaaatgatgtaattgtattataacctgaaaataaaaaaatagagttataaaactataagtagaaactataagtagaaaccaaactaaaataagtttcttaaagtgataataaccaccaacttttcttatgttcaatacctgctttattagaaagtattgtcagaggagttgatattggtgagtgtgtgtgtatgtgtgtgtgtgtgtgtgtgtgtgtgtgtgtgtgtgtgtgtgtgtgtgtgtattacatgtattagttaattcatgccatgaaatagatgtcatagcctaggagagttggctctagagctttagtgtacttaaaagtgaagctacatcctcattatggtgattggcattataattttaaatgtgtataacaccctgagaaaatgatggtttgacatcaatggaagcataagtttgactgataggcatatctatgtgtgctcagagtggatactgatgtttcattctccaaaactacaaccatttgaacactgaaaacctggagcatcataccatagctatgaatgccaatgttctggagtcaagcattcctaggtttgatgtccagggtttgaattcactatctatatggcctttagcaggtcacttaaatattatgcatctcacttttctcaccttccaaatggggataatatcagaatctaccagttcactcatttatgagccttgagattatctatgcaaagcagttgggtctgtgttttatactcataggtataatggagtataatatactagcaagcatttgataaaaagattctccaataaaaattgccattatgaggtctcagaagcagcattcattaccccacggtatgcactgccaactgaggattcatcagtcctccatgctggagtttggctcagatttcctagagtcctttctttccacatttcctgactaatctgctcttcaaaatcaggctcggataagtggggaatggctggatccttttgtgaattgatttgaaatgcaactaatggctcctccttctattaagtggttttctatagtccccgttttattgctgtgaagagacaccatgatggaggcaattcttgtaaatgaaagcatctagctggggccatgctgatagttttagagggttagttcatgatcatgaagggaaagatcactccagggatagtgctggagaagtatctcagaactttatatcccgatccaaaggcagaagacagagagagactgggtctggcagtggcttttgaaacctcaaagcccaccccagtgacatacctcctccaataaggacacacttcttaatttttcccagacagttttcctaacttggggccaagcattcaaacatatgaacctctctgggagccaatttcattcaaatcaccacacatataccactgtaattccttcagggcattgtatgtactgtaatttatcaatgtagaattgccatggtctagtctcaaggtagtgatagattgatgagtcaacaaccagaaagtcattgaacatactccattttggtttttaaaacattgcaaaggaggtgatttacaaatttcattttcttcctcaaattccttgctttttacatactaaaactgctaatctcctttctccttcctatttccaattacattttggtgacaattccactcacatgtcttctttcctttcttctttgtctctccttttaattatgtgccacatcatggccaactcatggtccagtaaaagtcctttcctgaaaagctggtgggacaggaggactgagctgaccaacttctgtgtcagatagttagcacctactgtgaggcaactgagcacagcttcttggaggccaaaaggaaaggcctggggtcttgagtatggatgcaggctactgagcttataaagggcagcggttgtccagctagggctaggcaagatgtaatgggaagagaagccaagggctgattctcctcaggaagagaactttgtttaagagcttcataggatccaggtgcttgatctctgtttacatttcacacatttgcagtttgcaaaatgattgcttgcaaaatgtttacttttgggagcaattaaagtagctatccaagagtgaatattctcaagagttatcttgggctatcttttcccttttccaccccaatcgcatagcttgattacacattcagtactgtgctcttttctaggcccgtgtttgacttcactctgtaatctccagttcatttaacaccatgccaggggattaattttcctaaaacacatttttggtcatgggcacttctcattaggattcagaattcattctatccctgattgtacatagtctgggtcagtcagtttgctaatccaacacttttgtttgtcttccaagctatctcctacccactcccttctcagctctctgtagaccccatctgattaaaatgaaccgatgatcccatgtctgcttgtttacacctttttaaagtatactctcccaaactctctaaaatctctctcttctacatacccagatcctattttatcttttgcaatctttgaccattataacctgtccatagacttggtagctatggaaaataatattcattagtgtttgacaattgtcacttgataaaagaagtgaggcttttaagtattcttatactaaactgtaagatatctgataaaaggtcatgaagtggaaagtatttctattagttaatatttcatttaaatacacaccagtatagctgaaacttggatcaagaagcagaactttggtaggacccagaagcccctcttctatcatcatctgatgaccagctatattttcctttacaaaattaccatttttgtcataagtttgttttatccatgtaatatatactcactcatgtttagttcatttcactgagtattgtttgtgagtttgttatcattacttatggcaatattcactagtttgtcttatcattttattttgtgtgtgtgtttgtgtgtgtgtgtgtgtgtgagaaagagagagacagagacagagacagagacagagagacaaagagagagagacagagacagagagagagagagagagagagagagagagagagagagagagagagagagagaatcttttctcatgttgatggacatttgtattgttctcaatttaagatattatgaatcatgctgcttcaaccattttcacatgctttgtttggcaataatatatttgtaattttctttagcatatcctttggatttgagttcatggagtataagatttctgcatactaaattaagtatatcatacatcctaagacttttcaaggtgttattctaactgcaccccttcttgccaggcacacagtctcattgttaatgagacaatatttgatgggaacttttcattcttaaccattttgataagtttgtaaattgcagttttagtttatatttccctaatgattaaaggaatgaataatttttcatgtttacaaatcaaatttcatctttcatgaaatatctattcaagtattcagctgactgatctacagaattgccttagttctgagtttggggatttccacatatattctctatgtaataagccttttgcagattgaacatatgtaaagttatttttcctactttgagcttcattttttgactcctggtattgctgttggtgatcctttttttttcaaattataaattaattttagagcagttttaaatttaaaacaaattaacaagaaattacagggttttctcatagatcttcaggttgtgtattagcaagcctccagcaataccaatatttccctccaaaaatatttgaatgagtgtatttaaatccattgccctattctcatgaccttaaatatgcaggctacaaaagagtccagcttggtgttgtatgtcctatgtataatgatacacattcaccctggctgactttcccccttaggataaatgccatttgtttcttgcttcaggcatccttactcagtgttagtgaatatgctttcctatgttatgcctcaaaagatttactattttatctttcatatttaaatctataatttacatggattgaattttgtagatgacatgaaggacccaagatttattttttaaaatctacatatttagttgatgaagcactgttcattgaaaagattttatttatatagtgccacgctggttgtagatcaagtagcatgtatatgcatagctcaggacactctaatgtactgattgatttgtttattagtaccctgctcatgctgtttgcttgttcttggcacataaataggattttaagactctacagcatctactcaccttgccaaacagttttacttagtggtttatttatagtgctaggtatacaattacgtaatgttttctaatatttaagcacttttatttctcttattttgttctgggttttaagaaccttaattaaaataatgaacagaaatggtattgtgggtaatctatttctttttgtgatgccaaatttatagttggaatcatgcatttcaccatgaagtgtaagttttgtttcagattgtgtgcctatcagttatctttcttactgatgcaaattttaaagactctgaaatcatgaatggactctacatattattttgtgtccatttagataaacattattactgatttctgtctacaataagacattatcacagttctttaaaatttgttgataactgtttcatggcctagcatatgattttaaattttaataaatattgcctatgtattttgtagaaagtggcatattctatactttggggctgcacagttctaatgtttaagttagatcattgattgtgtatatggcttgaatcatctacatcctgaatacttttctgtttgttagcttcatcagtcactccaagagtttaactacaatctaataagatgaaatacgtgcctgactattctcagtactacaaaattttcctttatgttttgagggtgttacccagcatatctaatgtgtattataattgttttccattaaaccaatacattattctgaaacctctctctatgtatccagtgaggattttttcccccttaagtcccttcttatggctgcagcataccagctttccttgggttggtatttggttatgcctcccccacttttaactctgtatcttcctatttctttaaaaattctatcttggatgatgtatataggtgttaaattttaattcaatctgcttttgtctagtatttcatctatttacagtagttttatcaatacatttgacttgggtgtagtatagtgatttgtgtttcctgttttaatgtttcctttttttccttttaaattagtcatctgtcagctctccctccttttgtcattacatatgcttcctgtttttttttttttttttgaggtgggagactccatcttgtagtatatcacaaaattagtaaaagtagaaataaaataccaattttattatttacagagtgcaatgagcaggtaacagctgttattgtttcttaaattactgttgtaaagtgttactactgtcctgtgtaatgataacttgtacagatttaacccatggttgtctttctatgatatttttttttcttaaatcacatactttcttatgccaattatctttctaccaaggaatgccctctagtgtctctgttagtgttgttgggttgctaacacattctctaggtttgtttttgggaaatgtatttgattttattgtcaatgcatagtcttgtcatatgcagatccctggtagtttcagttctgtcaactcattgaggattctattccattgccttacagcttccattctcttactaaaaaagctggctatcattttattgttgctttattgaagttactgggcattttcatctgtctgttgggagttttctctctctctatgatagcaagaagtattactatcatgtctgtaacaataactttccgccagccgcctgagttctgccaccatattagggcccccaaataacacacagaatcttatattatttacaatgctgctggccaatgactaggattttgtgtttgctggctctgtcttaagtatcaaccataaccattaatgtatatattttataaagacttatcttattgaggatgccagtggcatgtgtcctctcttctggggatcacatggcgattctctctttactacatttcccagaatcctcctcgactcctagtcccacctatcttgcttccctattggccaacagtgctttatttatcaagcaataagacaaacatatacacagaaggacatcccccatcaggtgactctgtatttttttatctgtctctacccctctccttagccctgtcctcctccctctctctatttctttctctatacccctccctctctaccccctacactgttgtctgtgaatatgtacgtgtccgtgttttgtatttacaatactagtggcttatagtgtatgatctgtgcttgcaatttttaacatgtgttagagtatacctagtagtgaattctgctcagaattctgtttctgaattttttctatttctttttacgtatttattttttgagataaaatcccattatatagccaaggctggcctggaatccactatgtagcccaggatgtcctcaagtcatggcagtcctcttgcctcagcctcctgagtgttgggattacaggagtgtatcaccacagttgtccctgttgtccatttagtatagaaatttgccttggactcctcttctaatttacctatccagttttcaactgctgaacttttaacagttgttattttatcagctctaaaatttcactttaattttttttcataatttcattttatccactaaaattaacaaaattttgatctcaaccttcaaacatttttcacaataacattaaaacaaagacaattctaggctcagtttctttgacactgcttctattgggaatttttgttcatttgtttgtttgtttctggtaatagaattgaatgtgtgattggtttgactgaatctttctggcttgtgaaaaatcacagagatgggttaactctagatactgtcccttttctgctggagaatctattctttctcttgacaggcaggaagagtggggtgctttatcttgacccaggtatggactgagcagatacagagagatatagagagaccagtctaatagggacaggaattttaggggtgaacatttaaaaccctttaagccttggagctatcatttgtccctgtagtagcactgtagggactgtgctcagcatcttagtggttcagatccatatatatatatatatatatgtatatatatatatatatatagttttttttctagttcactgagtgttttgtaagggtaaatggtacccaatgggaactgggcccagtcagctcatctttcagcttcccattctctgtaacattgaccacccccaacgccttgctatttgcaagtattccggtgcctcactttgactcatactacatctttcatttttccttggtgagtatgtgtggttcattaacacaaaacttgataaaattctgaataattatttattttgaataaaaatatctaattaaaatgagagatgggctcaagaaacaatgcaaaccggctattatcctagactttggtgtgttaaatattgaaaataataaaagttaccacattttctgtatccattctttagttgaggggcatctaggttgcttccaggttccggctattacaaataatgatgctatgaacatcgttgaacagatgtccttgttgtatgaatgtgcatctttttggtatatgcctaagagtggaactgcaggatcttgagatagactggttcccatttacctgagaaactgccatactggtttccgaagtggctgtacaagtttgcactcccaccagcaatggagaagtgatcccttttctccacatcctcggcagcacaaactgttattggtgtttttgattttagccattctaacaggtatgggatggtatctcagagttgttttgatttgcatttccctgatggctaaggatgttgaacaatttctttttttttctgactttttaaaatttgaattagaaacaagatagttttacatgtcaatcccagttcccattacctcccctccccccccactaacaccctacctatcacatgtcttttctggttcccagggagggtgagaccttccatagggtgtcatatactttgggatagggcctaggcccacccccatgtgtcttggtttagagagtatccctctatgtggattgggctcccaaactccacacctatgctagggataagcactgaactactacaggaggtcctgtagatttctgaggttttctcactgaaacccatgttcctggggtctggatcagtcccatgctagtatcccagctatcagtctggggaccaagagctctcccttgttcagatcagctgttttctgtgggtttcaccagcttggtctggacccctttgcccatcactcattcttctctgcaactggattccagttcagttcagtgattagttgtgggtgtctgcttctacttccaccagctgctggatgagggctataggatagcatataagacagtcatcaatctcattatcaggggaaggcattaacggtagcctctcctctgttgcttagagtgttagttggtgtcatctttgtagatctgcagacatttccctagtgcctgatttctctgtaaacctaaaatatctccctttattatggtatctcttttcttgttttcttctattcttcccttgactcaacctttctgccccctcatgtcctcctcacccctcctcttctccccttttcattctcctaactccctcccccctcttcccatgctcccaatttgctcaggagatcttgtccttttcctcttctctagaggaccatgtatgtctatcttagggtcctccttgtttattagcttctctggcagtgtggattgtaggctggtattcctttaccctatgtctaaaatacacatacgagtgagtacataccatgtttgtcttttttgactgggttacttccctcagagtggtttcttctagttccatccattttcctgcaaatttcaggattccattgttttttttctcctgagtagtactccattgtgaaaatgtatcacattttctccatccattcttcagttgaggggcatctaggttacttccaggttctggctactacaaatagtgctgctatgaacattgttcaatagatatccttgtatgaatgtgcatcttttgggtatgtgcctaagagtggagttgctggatcttgtggtagattgattcccattttcctgaggagttgccatgctgatttccaaagtggttgtacaagttggcactcccaccagcagtggaggagtgttcccctttctccacatcctctccaacataaactatcattggtgttttttattttagccattctaccaggagtaagatggtatctcagaattgttttgatttgcatttccctgatggctaaggatgttgaacactttcttatgtgtctttcagccattttatattcctctgttgagaattgtctatttagttctgtacctcactttttagttgggctgtttggtgctttggagactcgattcttgagttctttgtatattttggagatcagccctctgtcagatgtggggttggtgaatatcttttcccagtgtgtaggctgccgttttgtcttactgactgtgtccttagccttacagaagcttctcagttttttgtggttccatttatcaattgttgagttcagtgtctgtgctagtggtgtgatgttcaggaagtggtgtcctgtaccaattaattcaagggtatttcccactttgtcttctaataggttcagtgtggctggatttatgttaaggtctttgatccatttggacttaagttttgtgcatggtgatagacatggatctatctacagtcttctacattccagcatccagttatgccagcaccatttgttgaagatgctatctttattccatcgtataaatttagcttctttgtcaaaaatcaagtgttcataggtgtgtgggttaatattggggttttcaactctattccattggtctagctgtctatttttgtgccaataccaagctgttttcaggactttagctctgtaatagagcttgaagtcaggtatggtgatgcctccagaagttcctttattgtatggggttgttttggcgatcctgggtcttttgtttttccatataaagttgagaattgttctttcaaggtctgtgaagaattgtgttgggattttgatgggaattgcattgaatctgtagattgcttttggcaagattgccattttactatgttgatcctacctatccaagaacatgggagatccttccattttctagtatcttctttaatttctttctttggagactcaaaattcttatggtacaggtctttcactttttttggttagtgttaccccaaggtattttatgtcatttgtggcaattgtaaagggtgatgtttctctgatttctttctccatgaatgtatcatttgtatatagtagtgctacagatttttttgagttaatcttttatcctgccactttgctgaaggtgtttatcagctgtaggagttccctggtagagtttttcgggtcacttatatagactatcatatcatctgcaaatagtgagagtttgacttcttcctttctgatttgtattcccttgatctccttttgttgtcctattactcttgctagaacttcaaggacaatgctgaagatgtatggagagagtggacagccttgtcttgttctgaattttagaggaattgcattgagtttgtctccatttaatttgatgttggctgtctgcttgctgtatattgcttttattatgttaaggtatgttcctgttatccctgatctctccaagacctttatcatgaagtggtgttggattttgtcaaaagctttttcagcatctagtgagatgatcatgtgtttttttcctcagactgtttttatggtggattacattgatggatttttgtatgttgagccatccttgcatcactgggatgaagcctacttgaccatggtggatgattcctctgatatgttcttggattcaatttgccagtattttatttagtattttttcgtcaacattcatgagggatgttggtctgtagttctctttcttagttgtgtctttgtatcgcttgggtatcaaggttatcgtagcctcgtaaaaagagtttggcaatgacccttctgcttctattgtgtggaatactttgaggagaattgatgttagctgttcctcgaatttctggtagaattctgcactgaagccatctggtactgggctttttttggttggctgacttttgatgagtgcttctgtttcattaggggttatgggtctatttaaattgcttatctgttcttgacttaattttggtaagtgaaatctgtccagaaaattgtccatttcctttagatttttgaactttgaggaatacaggtttttgatgattctctggatttcgtctgtgtctgttgttatgtccccctttgcattcctgattttattaatttgcatgttcactctctgctgtttggtaagtttggatagaggtttgtctatcttgttggtcttctcaaagaaccaactctttgtttcattgattctttgtattgttcttctagtttccactttgttgatttcagccctcaatttgattatttcctggcgtctactcctctggggtctattggcttctttgtgttctagagctttcagttgtgctgttaattctttagtgtgattattctcctgtttcttcatgtgggcacttagtgctagaactttccttttagcactgctttcaaagtgtcccataagtttgggtatgttgtgtccacattctcattgaattctaggaaatctttttttttcttctttctttctttctttctttctttctttctttctttctttctttctttcttttttggtttttcgagacagggtttctctgtgtagctttggagcctatcctggcactcactctggagaccaggctggtctcgaactcacagagatccgcctgcctctgcctcccgagtgctgggattaaaggcctgcgccactaacgcccagcatggaaatctttaatttctttttttttttttaaatttcttcctccacccaagaattgtgaaattgggcgttacttaatttccatgagtttgtaggttttctgcaatttgtgttgttgttgagttctaactttaaagcatggtctgataagatacagggggtcattttaatttttttgtatctgttgaggtttgttatgttgcccagtatgtggtcgattttagagaaggttctaggtggccctcagaagaaggtatattgttttgtgtttggatggaatgttctatagatgtctgttaagcccatttgggcaataacgtctattagttcctttgtttgtttgttaaatttctatctggtgttcctgtccagtggtgagggtggggtgttgaagtctcctactataagtgtgtggggttttatgtgtgatttgagttttagtaatgcttctttcatgtgcgtggttgcctttgtatttggggcataaatgttcagaagtgagacttcatcctgattgatttctcctctgatgagtaggaaatgacctcctatatctcttttgattgatttagtttaaagtccaatttgttggatattaggattgctaccccaggtggtttcttgggtccatttgattggaaaatattttcccaacctttaattcttaggtactgtctgtctttgaagttgaggtgtgtttcttgtgtgcatcagaaggatggattctgtcttcttatccattctgctaacctgtgtctttttatgggtgagttaagaccattaatattgagggatattcacgaccattgattgttcattcttgtttgttttggatttggtggtggtggtgaaattatgtgtgggtttccatcccttttttcttttggctgttggtaaagtgggtttatctattgcctatatttttctggttgtagtcaatttccttgggttgcagttttccttccagaactttctgtagggctggattggtggatatggttttttgttttttgttgtttgttgtttgttttttgcttttttccaaacaggctttctctgtggctttggaggctgtcctggaactagctcttgtagaccacgctggtctcgaactcacagatatccacctgcctctgcctcccaagtgctgggattaaaggcatgcaccaccactgcccggctggatatgtattttttgaatctggttttgtcatggaatatcttgttttctccatctatattgattgaaagctttgctgggtatagtagtctgggctggcatccgtggtctcttagtgtaggtagaatatctatccaggaccttctggctttcagagtttccatggaaaaatcaggtgtaattctgataggtttgcctttatatgttacttgacctttttcctttgctgttcataatattttctctttgttttgtatgtttggggttttgattattatgtggcaaggagactttttttggtacagtctatttggtggtctgtaggcttcttgtactttcattggcatgtctttctttaggttggaaaagttttcttatatgattttgttgaatatgttttctgggcctttgagttggatgtcttcaccttcttctatacctattatttttaggtttggtcttttcacggtatcccatatttcctgaatattttgtgttagtgatttgttggactttctttggttgatgagtctatttctcctagtgtatcttcaactcctgagattctctcttccatctcttgtattctgttgggtatgcttgcatttgttgttcctgattgtttatccagcttttctattttcagcattccttcagattgtgctttctttattgcgtctatttcagttcttaggtcttgaagtgtttccttgaaggatttgttgatatcttgtattttttttggtttgttttttcttccatttctttaagggattgtgtcatatcttctttgagaccctctatcattttcatgaatattttttaaggtcattctcttctgtttcatctgcattttgatgatctggtcttgctggtgtatgtaccctagtctctggtgttgtcatattgttttttgttgttgaatgtgcttttatattgtcttcttcccatcctttcttctggtgggtgtagcaggagtctcttcctctcctggtgggtatgggtgcaaggttcccttctggtagatgcaaacagttccaatactctgatgtctgtcctcttctcttggacaggtggatggatgttggactgttaccagggacttggcagtctctgggtgtcctggagcctgctggtctcgttcagatcctgtaatcagacctctggagtcaggtgtccccttctggagtcaggtgtctcctgagcaatttcttaattttctatcagccatttcagattcctctattgagaattctctatttagctctctacctcactttttagttgaattatttggtgttttggtgactaacttcttgagttctttgcatattttggagatcagcccctctctctgatgaggggttggtagaaatcttttcccattttatgggctgccgttttgtcttgttgattgtgtcctttgccttacagaagtttctcagtttcaggaggtgccatttattaattgttgatctcagtgtctatgctactggtgttatattcaggaagtggtctcctgtaccaattcgtttgagggtaccacctactttctcttcaaagaggttccatgtggctggatttatgctgaggtctttgatccatttgcacttaagttttgtgcatggtgatagataggatctatctgcaaacttctacatgtccacatccacttatgccagcaccatttgttgaagatgcttccttttttccattgtatagttttagctttttgtcaaaaatcagttgctcataggtgtgtgggttaatatcagggtctttatttggactccattcgtctaccagtctatttctgtcccaatactacaatattttcattactataactctataatagagcttgaaatcagggatagtgatgtctttggaagttcttttattgtacagggttgttttggctatcctgggtcttttgtttttccatatagagttgatgattctttcaaggtctgtaaagaattatgttgggattttgatggggattgcattgaatctgtagattgcatttggtaagattgcatttttactatgttgatcccacctatccaagagcatgggagatctttccattttctcgtatcttcttaatttcttcctttaatgactcaaagttcttgttgtacaagtctttcacctgtttggttagagttcccccaagatattttatgttgtttatggctaatgtaaagggtgatatttctctgatttctttctcagtccctttattgtctatatatacaaggctactgatttttttgtgttaacattgtatcctgccactttgctgaaggtgtttgtcagctgtaggagttccttggtagaattctttagattacttatgtaaagtatcatatctgtggcaaatagtgacagtttgaattcttccttttcagtttgtattcccttgatctccttttgttttcttattgctctagcaatgacttcaagtacaatattaaagagatatggagagagtggacagacttttcttgttcctgattttagaggaatctagttgagtttctctccatttagtttaatgttggctgtctgtttgctgtatattgcctttagtatatttaggtatgttcctgttgttcctgatctcttcaagacctttatcatgaaggggtttgaattttgtggaaggctttttcatcatctagtgagacgatcatgtggtttttctttttcagatattttatgtggtgattacgttgatggatttttgtatgttgaaccatccctgtatccttgggatgaagcctacttgatcacagtggatgatttttctgatgagttcttggatttaccattattttattgagttttttgaatcaatgttcatgagggaaattggtctgtagttctctatcttagttgtgtctttgtctggtttggctaccaaggtaattgcagccacataaaaagagtttggtaatgatccttcaaccctcaactttctaaaatgtcgttgtatagttttagaggctaattttttcctgttatttaattttaaaaagtgggcaaacttagcaaagtattacaagcatattccaatttttaactcaaaggaattgagttcttttcttgtttggatcaatgttcaaaaggtggttagtgtcatcagtaaggatgtaaagtggcagtgattcgagctacatcacctagtcacttcaagaaccagttttacacagctaactatataaacggcattttttattacatcactgaagaaaatttaggagcactgtcttaaatttttcagcacatcccaataatgtcaaaggaaactattgtgatttgcttgcctatttcttgtttgatgagcattttaaacaaatatgcagggctttgcttgatgtggaatagaaaatttggacagtagagggtgcaattgtcccttggttctgtattttggctgttagaaattatttaatgacaaacaaaaatgtgaaaaatgcactgtttgctatatattttttgtggaaatgtatttaaaaatgaactgtgtaaataaatgtacatgttaaaatcatgtaatactttaattttgtactttaaaaacgacatcttaattacaaattaaacaaaaattaaaaagcttaaagaacgttttgtctatgcaggaaagtatagatgttatagattcataagataattttctttcatagcaactaaatattattattcatatgtatttccctcttttcaaatgttgcttttaaaaaagaatatgcacattgacagctatcggaacccccccaacccgagtgaaaggatatgatgctaagaggttcttatattcaactgttggtttccactcagctttttccaatgatccagaagtttcttacacttgcaagacaaaactgacatttatacttaaccagtaaggcaaatacatacatttgtatttaaacttcatttatagagacatgtggggtttaagtatcaaagcctttaaggcttgtccccagatttctctctcatagataagtataaagttgaagaattttaaaagcctctttctcacttttaaaaatgaacagaaaactcttgagtaagaaatactgcttgtttaacatctgcaaagcatataattattatttgattaaattgaatggcgatttaacacagtgttgcagctttagagttattaacaacactcaaaggcatcaatgttaagttgataatggtattaagattattatttcattgggaggaacaaatctgatattatacagagtcaaataaagagtaaagaatcagagatagaccactggttgagatggccgacgccatactgaaaaagtggagattttaataaatctattttttattaaaaatagatacttttttcatacaatacatccagaccacagttttgcctccttccatttctcccagctctgcaccccacctcccctctctcctgtattttaaaaaccaatggggaatgaaaaatatttggagagataacatttgctttttgtacataagtttgattggaatctttcttcattttgaacttctaaaggtgctataaatgaaatgatcccatgggtcacatgggttggttactgatcactgaggtaactagtctgttaatgggaagtccctgcttccaaaacaatataatatggcataatagtttttgaaagaggtacatgtcaagaaggactgctcaataggctaactcctacatagcctttgaaggaggccctggaactgtggaagaaataagattagtattaatcaatggctatgccatgaaggtgccagtagaccatgaaggcagtgtgctattagcctaacaagaaatatgagatcatggtgattcaaagtgtggtagagagttgtcgtgctgtaatctggagaaatggtttgatatgaagaagcattattttctagaaaattacaaggcaatgggaataaaccactgttatgtgtacatatcttaagtagcttgctctgtagttcaacaagtgatttctgagctttttattctgaaacagagaaacaagctaaggccctaatatatgtggtttatcattcagccatatatatatatatatatatatatatatatatatatatatatatatagtcatacatttcaccatataacagaagaattgtctctttacccaactttctcggtagatgatattgattttcattcatttattcttttctttttttatcagtgaaattgacaaatacatagttaggatctcctcaggctacatgttggtgaacaaaataggtagagatccttgttttcaggaattttcagtctaatcagaggagttacttattgaaccaatatccacacgcttcatgctcatgaatcatgggaattgcaactgtaggggaaatgtcatggaatggctcagtaggattataggaagaaccatctaaagggagagctgaaaaatgaaattatcaaggtattgaatcaaaagatgtctggtggtgactgaggctggatttgaagcaacaaagaagtagggaaggcatttctcaggagagaagagaatcaccactgaaaaacatggaaatgttaaaatgatattgcttggcacttgggcacttgaaaatgaaaagggtcatacaaggattatataattaattgttaaccagttaccatcttgattttgagatcatggtaattttccttgaatccattcttaacacagcctcattttaaagagttatcatttgatagtagcttgaatggcagcacaactcctatattcctgtttttctctcatgaaactggctgtggttatctattgggcaaactgtggttgtaagagatgttggtacttggtggtgttggtgggaccaggacttcatgctctgattacagacactgctgtacatgcagaagccataaggaatctcacaagaaggggaggtgcttagagcttgtatttggttgtctctctttccttttgacagctgagtattacggaacctgaatggtccaataaactttgaaaaacgttttaatttcacaaactttattataggaaaacttactcataagtaaaaacattacattccaaattaatgggactcaaagtttatacaattcaatgaacttttataacagtcagcacagaaatgcaagccatgaggctccacattagatccaaaatattcatttactgtgttctctgtggtgaacatcatttcatatatttaaaaatagttctttaaaaatattaatgactcactatcagtcatatgattgcagggaatcaatcaaatcctaacatgtgagttaggagttcttgatgccttcacagagagctcgtagggtactacaatcccatttcctgaacatttgaaacaaacttgaattttctctcactaataatcttttgtatttcagtgactttgaagactttgtaatgggcagagggttgagctgtatctaaggaataaaaagccattgggatgcctattccctgtaaatatctttgcccaagagggtgaagtataaataattttttttacacctgactcctttgtccatcagcttttaccagaatgtggaatagtcaggagagcagctttccctttttctccacagtgtggtgggtgtgtctgtcaagcacactagaacatagacacagatatacactgccttttttaacatcacatggagtcacatagtagcacaaaaagctccctgtaatttggagaacaaagtagacatttcaaagatttaaaaaaaatattttattttctataacagattgaagtgatctaaattattcccaatgactttcatttactaagagaagtaggataggattttcatgtgacccaaatcaagcttctgtgtgtagtaatgctaaaaaggccaagtcaaaagtcagcaccactacaaatactgcattgagtgaaaataatcccaagacttcatgaatgggatgatatgaaattaaaaggtttctgtgaagccaaagaaactatcaaaaagtgaagataccacctacaaaatagtaaaaaaacaaaaaaacattgtcaactatacattagacagataaatatctagaatatataaagaactgtaaaatttgtttcaccaaaccattacccagtcaataaacaaacatgggagcacacagacaattcaccaaagaagaaatatagtgtccaataagtatttgaaaattgtttgatgttctcagagaaatgcaaaccaaaactgaagattcttatgtcagtcacagtggctaacataaaatgaagcaaataacaagaaatactgccatagcgagaaatagagatacttattcactggtagtgggagtgtaattgtgtgcaaccactgtggaaataactatagagggttctcaagaaactcaaaatagaactattatatatggccagctataccaccactcagaatatacgcaaagtattctgagacatgataacagtcataactatacagatagtcagacatctgtgtgtatagctgtacttttttcagtatccagattagatgcctattaatgaattaggtaaagtaaaagtagcattgcactaacagaatgaataagcaaatgcagtaataaccacaactgaatttcatgtagcccaaaagaaaacttaaatcatgacctttgcagaaaaatggatggaactgtaaattgtgtaaagtaaaataagcaagactaagaaagacaaatactacagtaacatgaataaatagaagaaccagagactgatattggggttcaaacttcaagctgaatatcagcaaagcacagcagctggccactagcttcttacctctacctaggctgaatgggctgattctgtctccaggagctctcactaagcctcagactttaacttcacctcagtgtggctggagaatgaatgcctcatactgaatactgaagactcttcttctatcttttataccctcctagtgctgtgattaaaagcatgtgatctattttctcttttagactgattcaatctcatgtaaactgggtgaccctgaattgagagatcctttttcctcttaatccttaatcccaccacctcctagcttctggctgctggaattaaaggcgtgtgcctggcttgtggctgactttgctttctgaatcctcatgcaatctttaataaagcataaataatatatcaccacagactatatgtaaatgtatatgtatatgtatatgtatatgtatatgtatatatatgtgtgtgtgtgtgtgtgtgtgtgtgtgtgtgtctgtgtgtgtgtgtgtctgtgtgtgtgtgtctgtgtggtgtttgtgggagagagagagaatgaaagtaggaagcagatcatagaggggaggaagagatcttaaggtaggtgatggaaatagagtcatggatgcatgtgacagtaaaaagacactgtacgcctaaacgtgttaaaataatgtacagaaacaataaatgagtttttgtaaaaattttgtttaagaaagaacacctttgatgagtgtatcacaggccattcagttgaaacattattgtgttcaagcctgttgcagtggtccattcttgtaatctttgcgctgagaaggtggaagcaggatgaccaagtgtttaagggcaatcttgactacatagtgggttccaggtcagcctatctcaaataatatttaaagcattgattattttgagtgctaccaagatcatcactaggattatttgtaagaaatgggaataaatgtataattaaatacaactcacccctttctttaaaaatcaaacataaaacccacactgtgcttcgaattgagtcaagttccagacttgactcaggtgagttttctcattcctgtgcctttgggtttctccagaatagaaactaggatggtgagttgagcaatcttgatgctcattctagataagaaccccatgataaacatcattaataaagattgaactctggatcctcctgccttaacctcttggtattgtaactgtgtgtgtgtgtgtgtgtgtgtgtgtgtgtgtgtgtgtgtgtgtgtgtgtgtgtgagtaaatgaaaccatacggtgaatacagaataccattaaattgggcatctgcctgctttctgagaggatcctcctcttgcccaaagaggcaggttcgtatcagtgcaaagtagaacacacacacacatttctcaaagttctctattttcctagcaagcagcattacttttgtcattctgtcagtaaagtgttttgaagcttcacctgtcatcatttccacttaaaatggctgggtagtcaacatagatgcgttcctgaggaagattgaattttgaattttgactgcattatattctatggaaaacttggatgaattttccacattaacttcctaagtctgatctttgagggaaacattcttccataatgaaatgattcaagacagacactgaacatactgtaaaaatacaaaagagtgaaaaaaaaccctcttgtttattcttttggcactctgaggctaggcagtgcatattgccatttggggtattttttatgtgtgagaggaatgacacacattgcctgtgttcatggctgtgtgtatgtttgtgtgtgggtgcatgtgcttgcatgtggaagctagtatttgacaagcagtgtcttcctctattgcccctattgtcttccaccttttttgtttgtttgtttgtttgtgttttttgtttttgtttttctgtgtaacatccctagctgtcctggaactagctctgcagacgaggctggcctcgaactcacagagatccacctgcctctgcctctggaatgctggcattaaaagcattagccaccactgccccaccatccaccttattttttaagatattgtgtctcaatgagcctaagactcacagattggataaagattgtacaagaccaattggatagcaagccccagggatccttctgtccccacctccccagtgcagcaatggcctgtacagttttccatggcattggatataggtgctggagatccaaactcagatctccatgcttgtctaggaagtattttaatagctgagccatgtttctgactctgcctttagtagatgtttacacatttgtcttctacatccgagacattgatattatgagcattcttcatgtaccagataaatgtctgtgctttgccaaaatgaagtcttcaagatacaaactagaccagaaaggagttactgaatattgaatattttctaaatgtgttgttagggaagatcgtatgagatctagcctggggcttccaccctgttccaagagtgatactctggtaagcatcaggtatttattttgcctctgaaatggaatgacgttcatttattttaacagcttagtgcttcatttcctttttaatataaagatgaatttataaacatgtatctgagatgattgtatgaaagttacagtataaaagtttccttaatctggagtgaagagacacttcactaacctggtaagttaatgagagtgaaaatagctttggagtttctgactaagtatgttttgtctgcaaccattcttcctcaatttcctctttcatgattacaggaaattctcttggcttaattcagtcattttacatacggatcaaatattaattcactggtctattttattttctactgtccatcttcagtactttcctaccttaataatggaaatggtaaaaagtagtaaaaagtagattttccttactttaaatttatacttacaaaacatctaggagaagactagccaattcctgccagccgttaaagacaatttaaaacaaaagcaatgacaaagggaaaatactaaccacagagttatgctttcccaggtcatgtgatatcaaacccgctttcttaaaatttgaaagcacaagatatgtttattcatcatcatgacataatttagagttatgtcatacagtaaaaaaaagatgtttccctttgttttccaattcctgacatgttactttttgagattctgggacaataagtcagtaccacagggattctcagagtttttaaaattataacattttaaacacatttctaacagcctctaaagtcataatatggacatctaaaattctcattttatagaaaaaacagacaaaattcactagtactaaaaagaactacatctcacagggatgtttgttgaaacacacaatttcaatttcagattttccagtaaggtaacaggccctcatggaatcacacatgggcactgcccattaaggactaacaggaaatatttcagaatatttttgtggaaaatcttaacactttaaaataggaaactatgtagattttatatgccagaaccactgaattggaatggaggaagtgtaattcattaattgtgaagggcagacaattggatgttgcaaagccaggctggagaggtggctcagagacttagagcactcgctgctcttgcggaggatttgggctggttctcagttcccacactgcagctcacagccatagtctcagttcccagggatctgaggtccttttcagacttctgttgtcattgcacctgcatgcggtactcatatatatctacacacacacacacacacacacacacacacacacacacacacacacacgagtctgtgagtctgttgtctatctatctatctactcatgcacagaaaaaattaaacaaataatttgaaaatattataaaaagttttttttgtgaagcctttgctttttggagatcatttcactatgtattccaggttagttcagaacaaaaggtccttgctccttatctcccaactgctgggattaaaagcatgtacctgaatttaaaaagtattttaaattatgttttatccattttatgatttacatttgtgaagaacacaatccctttcctcttaaaatcttctccttctggcattagaaatgcacagtgtactaatgagtatataaagaacattcattctcttagtgcctgggttttaataaagactgctttagcctaaggtccaacaataacttaccaccattttgagccaacgactatgaggatacatttcagctaatatcaggcatgacactaattcagtattaagtgctaagcacattagcaatttcaatgtagagcactatggctttccaagtcactgaaggaaggtttttttttttttttttatcaatgccttttcttttcttttcttttctcttctcttcttctcttttccattcagaacttactatttgaagtaacatgactttaaaacagtccaaccattagaattgttgcttatatatatttaaatatatacttagaattttatttcaattttaaattaattttattttatgccagtgggtgttttgcctgaatgtgtgtatactgtttacatgcctggtacccatggaggatagaaggcctcagatcattccaagctactgtgtgggtgctgaaaactgaacccatgtcccctagaagaacacccactgaatttaacctctgagtcatctccctaaccccaatgtagactctttataatcaaatatccctccccactgcaattataagactaatttaattctatgcgtgaagaaaagagtaagtgctcgaattattgtgcttaattcataggaaacgaatgttaattgtttccataaaagcaataaaccaaaagagacacctatatagggcagctcacaaccaccttaaagtccagcctcaggggatagggcagcttcttctgaccaccgaaaatctctgcattcatatgtgcatactgacagtcacacacacaaatgaacataatttttaaaattttccatggatgcagagtaaaaataattcatctcttgaaaaataatttcaggaccttggtatttcaaataaaatttatttccagcattggttaagaacaatacccaaacaaatcaaaactttatcacttacaatctaaaaaaccagctaaaaacatgcttgaacaaattagctaaaacatttgagggccaggaggatgttttagtgggtaaaggcatgtgctaacccaaggaactgagttcaaaccctcaggactcctgtagtggaaggaaaggaataacacctgtgagttgtctgtcacttgtccatcacatgttcaccatggtatgtgcaatccctcaaaaaatcaatgtataatatttatcaccatcttattaattacagagaaaatccaagaattctaagttatgcaaaaggtataaaggtcttgggagaaattcaatattctctgtaataaaggcaaatgtaacaatatattttgtgccttgagcccctttcaaagtttaagccatttgaaatcggcagctcttttcaaccattcactttctttgtgtttcttgcagcagatccctgattcttaaagtcagatccatcatggaacactttttgaaatttgagcattttatttcaaatgagactgtgactggcattcatgctgctatagtttgtgggctttctgttacttaagaaaagtatacagtttagtattgcaaaacttcactttgataaaaatcctgattatttatggcttaagtgctgtttaaacatactttttgtgaggtaggaaacaatttactactttttcttcccttctttcccttgtagacgaggtttttacaagcaaggcaatatgtcccctctcttgtgtggtgagacattaaggaacctcatttaagcctcaagaaagaccgtaaacaaagttttcttgtccattgcttcttatacatctttagacataaactcctggctttatagacccccaaataaatcataagaaaaaatagcatgaaacattttcccagggaagtagaacattcccacaggttaactaaaattctggacttttgcctgggaagaggagattgtcccagaagaatgctgcccaaggatgccatcagtcatacaaagtcacagtacttccgctcagttgacttctaaggaaaacagcagtaattcagaactcttatttactgttatcttttgaaaatgtttcatgacctgtgcacttttttagattacattctgaagcaaatgtcctccacagcttcctgttggaaagaatgaacatgacatcatctatcgagagaatgaaatcacagtctttgtggaaagtgtgtagggttgcatatccctttcatttgcacctctaattaccaagaagcagacttgaaattaggaaaggaaggaaggaaggaaggaaggaaggaaggacagaagaaaagtaaagaaaagaaaaagcttgttgatatgccagtggctaggctttctttttcctattttgtaaagctcagatacagaaagctgtgtgcttaagggaataaatgagcaattttatttttttgagatagatttgtgtccttggctaatctgagattccaggcagtagttgtgtactgcaatttagttttaatgtattttccatctcttttgtttaagtgttaaagggtggacagatagaacactgagattataacacagagtgtggaagaacagtaaattaaagctctcaattaaaaaaaaatataaatttggaagaaccgatgaaggtttaattaactattaggcacttatgtaagcatcaaataaatattttgggcgttctaaataagtgttcccaagatgagaaaccaactcttggactgttagattgccccctccttgccagaattctagccccacactgagatgtcttgctggtgaagaggtggtggggagagacaaagagggggaacggagagagagagagagagagagagagagagagagagagagagagagagagagagagagagagagagagagagagaggtggtacagtgcaattaaggctcctgcagttttcccatcagtttttgattttacctcttctccaaagttggcaaagatcccccattaactgcgggctgtcactgaagtagcatttaaaagatgtggttccctttctgtaagaatgttttggaactccgctgtgatttttaagcccccacccacttcaccaaatccagcaaatggaagaagccaggcctccagtgcaccgctctgcaactgatgctagcacaaatggcagggaccagggagcagctaagaggccttctctggcccaaattcgtttggggtttggcctttgcccctagaagaattcattgatctgagtttgaccagtgcagaaaaggggagactgggagagtgggaggcttgtttggctgaagtcagataccccacccctaaccttccccaaaggctactactagatgtctggggaatccctccctcaccttcggagaggcaagtttctttacaagcgttagacacctgtatgaggcgctcccggtgggaaaggtggcttgagggacgccagagctcagttacaccgctttcctctgtgaggctgcggtcacaatccctccagaagtcagagctgttagcatacacagtccccgctgcctttcttggtcgacaggaacctagccccacattctggagccggagcccgccgacgcctctccagtttgctctgggtcctctccctcccacctctccacctccaaagtagcgctccagcctcgctccgcccgcacagccccagcgcccccgagctttatcaggctccccacacacatcgctggcttcctttggcacccggcgctggtgaccctcgctgagcagccgcctcctccaagcccaggccccctcctcccgcccgcgggtcactgcgcctccaggctctgctcccccaggcaccgcggcgcccaccgcctttcaggttcatctgggctggacctgttttgctcatccctaaacccggagaagtggaatctgcacactgaaactctcggtggctggagcggcagactgggcatgctcagaagccaggtttggctttggtctcaagtcgaaggaagcttttgcactcgcgaggcagcggcgactttagggaaagttgatccgagaggggaggaagccccaagacgcggagcagcggcaggaaggagcccccggcagcccggaggagcatgggcaccctgcgggatttacagtatgcgctccaggagaagatcgaggagctgaggcagcgggatgctctcatcgatgagctggagctggagttggatcagaaggacgaactgatccagaagctgcagaacgaactggacaagtaccgctcggtgatccggcccgccacccagcaggcgcagaagcagagcgccagcaccttgcagggtgaaccgcgcaccaagcgccaggcgatctccgcggagcccaccgccttcgacatccaggatctcagccacgtgaccctgcccttctaccccaagagcccacagtaagcagggttactcgcctgggtccatgtggcgccctggcggtggggagctgcgggtctctgtattgtctgtcggcccctgcccctcccgcttgccatgtctgtcctcatcctcagaaatgtctcattttcacggcacttcttgaggggctgtgcacgtttctcagggccagactccctgcacatccgttgccttcgtgtctttgtcagatgccaaggtatttttaaaatatacatatacgttcatatatgccacctactgtacatagagtttggacgcgccccaggtgtgtgtctgacggtgtgtgtgagtgactgttgaatggaggaatcagaaccccgtctttcccaaagccccagccaacctggccagccggaaaatcctaactgcaggctcatcagactgaaatgaaatgcgttgatattaccctgactttccacgctcttgtggctctcctggatttttctacatgccgccggcacttcaggctggtactgttcaaacctgatgttctctcaccatcaaagtgtaaaagaataagtcaatatacatataaaacagaagattttttaaaaatttcctgagttggatgacatttacaatccataaatggaagcctagtctgttgattcttaaaaatgttttcataatatctgagagagaatatgatttgtttttctaaaagaattctcacatgattcctaatgaacatttccctatagggctcatgtattttcagggccagtgtggtcaagcccacgttatttcccctgctgcgcctcacactcaggtctaaagccactctgccgctgttctagcatgttacagagcagtgtagttctgatgtcagtaggattcataacttggatgggaacactgaatgaaacttgttacacaacactcaaccccagagtccatatggagagcgagcatcagggacaggacggcagcagaaccagaacaccatctgaatggcattttaattaatagtaatgacataattggtaaagccgaggattctgttgtcctgctcttaactacataacacggctggatgacacgtgttacataataacagaaggcccccgagaaacctttacttcctaaacacaaggaattcataagaggagatagtgaagacttggttatctccatttgtatttcttggatgggaggggtcatgagtatatactacgtacacttttttgaaaacttacaagcccaatctatacatgttggctcccatgaatcatttgcaggcttagctgatggagtttgaattctgtggagtacaggagagttgacacagataatataaatatttctgaaatcccaaccttaccaagttgccatcatagatcagctgatttcaatttgtcttagaaactgagtgatctgaatccattggagtttcctttggtaaattaatttgcagtcgctggcatgttcgcctgtttcagctaacaaggtacatggccatctctcctgggccaagttttgcataatgaaaatgtaactcagagacagcgctttgtatctttaaacagtctgtaggattgtcattttagtatctgctggagtttggagttaccaagaacaaactgctcttataaaaagactatttttaatagacttttagacagagtatgatcaatccagctgataactccacttaagcattctatttgagaaagtctaaagaaatccaggcagcaggaatgaactgtagaatgtggtatgtttagaagactctcggtgtttgacacagggcactggtgtttttgtaaaattccacagtagacaataacattagaaaagcacattctttgtagtatccctgcaggacaaagattgtgtatgttgaacatgttttacactctggtccttatttgataactttcaggaccccattgttaaggtggtattgccatgtgagttttctaattctgaaggattatactgaagaaaaatgataaaatgtcttccaagtttaaataattttggaaaaacatctgttcttttttttcacacttacataaaggaaaccgaaataaaattgccttgagtggtagtgtacctttcttaggggaaaagaagtgtattgtatgcaaaatagttattatcctatgccatttgagtgaccgtacaagacaactctacatagaagtacaaaaaatgtgacaccctaaaacatttttttgcattttatcgtatattgtttgattctttttattattcagacttactgtcaacaagtgtttacttctttaatctttagtgcaacttaaatttaatcactttcctaaagattaagttaaggttgaagggaaactatctaagtagactggaatttatttcagctaccactttcctctttgtttttggttatctttccagtaggtgtagttaatgaccaactgatgaacggaacatatcctctagtgttcccttactgaggctgacttttgagaattacagtattttaaaacttccttttttattttagtaaccattgatcatttgaggataaaaaagcagtacaaaatttaaagtagcctcataactttttagcatcttaacagttttttcttgggatttttctctctaatgtgagaattggaagaaagcttctgttggattccaccacaggggaggacatttctgctatacctgtgaggtgtagtgggggcattggtctttcacaatctgtatagatgtcacctttaaacccttcttaggttatttatgaatgtgagggaagaattgatgtagcaaattggaatctgtattatcctgctgccaatgaactacttaaaaatgtaaaaagcacttgattctatgttccaaaatacattgagcaaaagctccctaacagtgaaacaaacaaacaaacaaacctcagacatccagtctgtgagatcagacaacctgatgggtcacttgaacttctaaaataattttatttcatggcatttcattcctacagatgcactcactgttcccaagtcttttctgttttgctgtcacagccttctatgtcattttagttggactacctcaacttgagttcctatcaaaacttgttaatgtctgtgtgtttttgtaaagctattgcctttacccccgaggtggcttcacttcagagaatgaagtgttttgttctgtttcactttgtgattgtgaaatactttggaagaattggagatagaagcaaaatgtattttttcctatttttaggtaggagttaaaatttaaaagatcccatgtgatctcctaaaccttgatattatatcccaagagaaacagtgtctccctaaacactatgtgtttaattctgaaggaagtcatggaaatcatgggattctagtatgattatatacagcttaatattaaaacatagacttctgtgaaggtactaaatttctaataagccttgcaagtcagctcaaaatctttctgtgaaaccttccatgtggaaattcttgtaaggtgcatacgccttgccattacagagttagcaaaggactcaacaatactatacaagtaaacctttagacacctaagtaaggtggaagacagagtagtccactgaaacacatggtgtgtgctgtggctcctattgaagtgcatggtatcaggaactccactgaggtacagggtcttgtgctggtgagactgccatgatttaagcacggcatgatgtgaagggaggggtaagggatggggagatgtggagatgttacaactcaagccgtcagcagcgagaggctttcctgtagcgccatgaatggaaccaaagctcagtttctatgattttatagagtggatcaagaggaacttaggcttgcttttagaatgatcaagaaccgtgtgtgtgtgtgtgtgtgtgtgtgtgtgtgtgtgtgtgtgtgtgtgtgtgtgtttcaccagggctagttagtgctgaaactctgaatatcagactgtggttctaactttccaccataactatattaactaggttaaaatatttaaccttaaccaaaaagcagatggtgaagactcttaaggaaaccaaggtccactcttaaagaaatcaaatacctttctgagtaccactgaaagtagtttacttatatgccataatccaactcggcagattcctcacatacctggacagactgatatggatgagaatgcaatcttgttagttattgaaacccatctcccctgcttctgtgggggagctaaattctgacccaaggttattagaatagtttccaattaagtttgagcattaatttgacattacagactatgcagtggaagaaagttgtgcaaagccttcataatattatatgggatcatgatgctaaatatcctgttagggtgtttggaagtgcagtcaagttgcttgcccctaaaatgggatgaataatgaaaatactgacaagccttaaatagagtagatctagggactgcctgggaatataaacagccatcttccttgctctacttggctgcatttccaagccctcatcatttagtgtttcattaaagagttggtttggatttttgctaggaaatggtagaatgagacatgccttgtttccattgttgctgtttgcaggttataaggcatatgggcacatttttttatcctgtctgcctagcaatggagggtctccatggtatcctagcaaccatatttgaacaccaggctgctgctctttctgctatctctaccataggtgctgctgcccatcccaaggaactggaattgcggctagcatcccagaccttctgacttgaacctgcctggcactgggaacacaagacaatgtgacaaacactcacatgctgaaagcagcacttaccagcacgctcaacagcttattatgcaatcacatctgtggcatttcgaatcctaatctgaatagttgggctggttttctttgccacccctcctgtgacagtctctctacttcttcacacacagctttctgacaccacctctagtccctcctaccatcctttgtagtgaataccttccttgctgtctccttaaggatttttttgttttgtttttgagaattaaatctgtacagcctgctcgaactctctaagtacagttttgttggtaagatcaaggaaagctctccttccccaactgacatttaaatataaacaatggctcaaaaactccagctacacaaggcagatgtttaacacaatgtgggactaagcatagtgcactctaagaagtgtcttgtttgggagtggaattttatgatcccagttattcatacaaatgagcaggagagtagagtagggagatgacattttgggatgtggagtactgttgaggctatgttatattttccagaagtttgaaagtagcaatattctttctggacatataaatatgccccaatgctggagcagagtttgcaagacaggtaagtctttgtgtgtgcaaaaactggcaaggaccacatcttgaagcttgcctgccttgagaagctcaacttagatattgtcacaaaataatgcaggtgtttctcttcatgccagtgtcttgttttcaatgctttgtatttcccccttgaagcatcacttaatctaatatcagggagggtttggtggtttgtctgcaggcctcagtgaggggaggaaagggcagtatgtcagcatgtaactgttctgaaagcaggtcaagaatgatactgccatcatcatcatcaccgccaccaccaccaccaccctgctaattttcatgggacactaactctgtggcagatatctttcccttgcttaacctgcatcatgacttttttcattgtgagtgtgtgtgtgtgagagagtctgtgagtgttgaatgaatgtaatgaatgtatgtgcacattgtgtgagggtgtgcttacagcataggcatgtatggaagccagttgttgatgctgtgtcttccttaattgttattcctcattgctgctgccactactactattatattactactattattaattgaaacagagtcaatcaaggagcctgtggctcactgttggggctaatctatttgtctctcctactactactgtagttacagggacagtgccgcacctggcttttaagtggatgctacaattcaaacttaagcccttatgctttcccagcacatgctttattcaccgaggaaccttcccctcccttgcattgtggatttcaatatcattgtaaggaatattctagattattctcattttccaccctgagtaacggaacacccagactcctagaaagaaaggcccatgttcaaagggcatactcattgtaaaaaacttaagccagaatttgagctgctggagccttttttagaaccactaggttcttacacagccccaaagcctgcagggattggataaatgcagaacctatgaataacatatgggctgttctggggaaagtgtctgtgtacccataatcagacagaaagcagaaaaaccttcggagaagttgaagaaattaggtaggacttttcctcaaacatgactgcacattagaatcacctttaaaaaatctcatcccctaagttttaccaccaacgaatttttttttgagacagggttttctctcttttggagcctatcctggcactcgctctggagaccaggctggcctcaaactcacagagatctggctgcttctgcctcccaagtgctgggattaaaggggtgcgctaccaacgcctggctaccaccaatgaattaaaaccagtctttcagatgattcctatggtaggtccaatgtgaaacgaaacttgggagccactgtgatgagaagatgacaggacatggtgtgtgtgtgtgtgtgtgtgtgtgtgtgtgtgtgtgtgtgtgtgtgtgtgtccaaatagaggaccaagataagtgtaaagagttgaattaaaatcttttttttttttttttttctgagacatggtttctctgcgtagctttgcagcttatctggcactcgctctggagactaggctggcctcgaactcacagagatctaccttcctctgcctcccaagtgctgggattaaaggcatgtgccaccaatgcccggctatgggctaaaatctttatcagcttgcaaaagcagtgatgggttttattctttattcgattgtgatcatgtgtcttattgtttatgctcctaagcaagtatgcaatgttcctcatggcccattttttttctctcagccatggttgttcattagaaaactgccaaggaatattttaaacatatcttttctgggtgccactagcaagattgattcagtcactctggggttgggctcatgggatagtttaatccagggatggctctcaacttcattccaagttgagaacctcttcactagcctacctggcttctctcatgctacagattactttccattcttttggagagattctgctcctagagggatgaggcaactccagctgtgtgtcacccatcacagctggactgtccctttcactctgattctgggattgcctactatagttctggccacataaaagcctcagcagctccattcaactggtaagcagtttcctccttccagccatccacaagtctggccagccactggatatatattagggtcagtcatcaccccaagtttgatttccacttttgctgggggcagcggccttgccaacaggagagactgtttccttgaatcccagctgatgctatgaaatttgaaattgatggaggtgaaacaaagacaagtcccacttggaagagcagggcagggcttgtagcatttctctgtctggtatgagatgcctctgcagccagctagcttttttttccccttacagatattttatccttttaaggcaaacagcttgagctccggctgagaagtactttccaaggaggtttcaacgaaagcggagtaagcaaatcaacctctcagccccatttccagacagtttggtctgagagaccagatgtgggcaacctctggtagaggagaagtcttaggcaccccagtagcaaggggtattgtgggatataaagaatccctattcccggtgctctaaagtcaccactgtccctgaacaggctagctctacatttctttcttgcttccagtttccagctgaaactcctcaaggtcttggtaatggtctccaatagatatctcttcacatttgcaattcaatcattatcttctcaggtgagaatcaagcagtattgcgcttcatgtaagcaatgaaaatagctaatataattgcaaatgccttttggtaaaaaacacctccttacatccagggtcaatgaggaggagcttccttgtttctcttccactttgcatagatataacaatatactcagtggactgacagcatgttagaacatagtaggtaggataaggccacccagaggcttagggatgttaattacaaaaggaagttattcataaggaaaataaacatttttattatgaatgctgcatttggatattaggactaaatgggaaggagcagaggaataaataatgaaacactacaacacagcagcgataaaggaacatgaccacaaacacacattcactcctgttagcacttacaagaagcatggagagcacaggttggtgctgggatcctgcgaaggtatctgtgtctgagttccttttgattgtgtacaaagctgggtccagttggcagagctaagttaccagtggcaatttagtgcaggcctatatgattttcacttgcatcaaaaacagtactgtcaatggcctctgccatcctaaagatcacgaatgcaatccaaacttcatcaaacttgctgcaagaccgatgtaattaattaatttatccataaacacagagtttcataattatgtgcagctaaagcataagtaagtagtttacatgatttcctctcctctagaattgtaatgttttaaaaacagatgtgaggtttttgttgttagaaacttcagtttcgttttcttccagactatatctgctctttagaagcaacattgtgtttcttcttttacactaaacgattgtattatctgccattcagtttcatttgttaattgtattgaatgtcaatgatgacaaatttgctgctgctaagtaaaaagatacttttgctgtttatgaaacagatgtattatggcagtatcaagatatcaccagatcgagtgcaaggaataatgagattgtgtgagggggaaaaacatcctctagatatacagtgcatcaacctaatagtccagctttatcaataaattatggttttgacagtgcttctaagtctggactaagggagaaggaaaaaggacacttaagacaagaaagaaaagtgagcattctttgttttgtccctagggaactattattatagatgggtaagaggtaagattggccatacagtactgtgtctgctggcacacactgacaggaaggacaactacacactgtgtctgtccaggacacgctttcctgaagcacacttgtatgttactgtaagaacgaaaagatggcctggactggagaagtgtgctgctggaacaggatactttaagtgttggaaatctgcaggtactgttttgttaagcctgcaacagcaactcgttgtgccagtgggaggagagaaaataaggaaacatgcaagctggagcatgggactcagtgtgaatcatgtttttcatcacgagtaattgctactctcttattttggaactgtcttaccataccaaggcttcaaaaattaagcctaaagacacatggataattaaaggaaggtttggggctggcaaatccattcactggggtatgtctttattttcagcaatgaaatcaactaaatagaacatttccagttctgtagtgttggaggagcctttctcccagagcagatggatggacgcaaagtgaccagataaatctgagttgtcattcttatgatacccaactttatagaggtgcagtgttgagacctctgattgaatgaacagtgtttcttggtatagaccttaaaagcatcagaaatattgtgaaagaaaccatgctatgcctttttaatttttttttattaattcaagttagggaacaagcttgtttcacatgtaagtcccttctccctctcccacccctcacccccatccctcctcccccccaacctaccttcccaccccatccacccaccactccccaggcaggttagggccctcaacgggggctctgcaaagtccaccaaatcttcctgtgctggtcctgggcccttccccatgtgtccagggcaagagtataacccttcatgtgggatgggctctcaaagtcccttcttacaccagggaaaaatgctaatccactaccaggggctccctggagtgcagaagcctccttattgacatccatgttcaggggtctggatcagtcctgtattggcctcccagacagcgtctggggtcgatgtgcttccccttgttcaggccaactgtttctgtgggtttctccaacctggtaccgaccccttcgatcttcattcctccctctcttcaactaaattccacgtttcagctcagtgtatatctgtggaatgggttcccaaagtccatccgtatgctagggataaatactgttctactaccagaggccccatagattgcccaggcctcctcactgacacccatgttcaaggggtctggatcagtcctatgctggtttcctatctatcagtctgggttccatgagctccccctggttcaggtcagctgtttctgtgggtttcaccagcctggtcttgacccctttgctcattacttcttcctctctgtaacagctaaacactgaattgaattcatgctatgacttttaaaaatatttttagtcttaatcaaaaatagtcatttttctttcctttaaaacactgcaaatttttgttgttcttcataaaaggaaaaatctgacataaaaagtataatttgtctgactctgctttctatgtattttaggataatttagcaaggagatctctgttctcttattgtgtatataggaaactaagaaactaagtggtcactagtacccaaaacagaaaatactattggcctagatggcagaactttgaaatggtcttcataggagggggtggtaaataagtaaaacaaccagttatcccaccttttgataactcagacttcgtaattcatcatctttgctttttgttagactgcttaggcaccagagtgtttcactattcatagttttatgctaggaaaatacctagcataaaaatattttttttttctgatagttacctgctaaagagtatagtccatatcctttaaaaataataatagttaaattaaagagggaaatttagacatttggaagcattagatatgggcttttggacattcatgtgtttatgagtaattgtaacatgatttttgaacatgataatatttgaggaatagttcattatttccgtcataagttatattccatctataatataattgccagcatttagagaaacccaggtaaagattctacatactaagaaataaagcaattagaagggccaatgttgaattactttaacaaaatagccaagtgaggtgtgttgattaaacgaccatgttgctgggatttttattataaagtgcacaagaaaaacatcactcatctctgaggaggtgactcttctcgtgtggtacttacttcctgtggcttctcttgggtgtcattccgaggtcttgtgccatgcaattgtctgtcacagtaggtgctagagcagtattccatcttagtgatcaccaagggttactgccagagtgatggatgggaaatgactcaaccatacatttatttgttgtggcaagagtagatttctcagctagttggacttagaggttattaaataacatctaggtgaactcttgctagtgagtttttcaatcactgatgacagcttttctctctgccccttcactcccattcttagttcagcccattgttttatcatggtgaagggaaacaacataattttcagaactacccttgttcaaactcggatcccctttcctttcattttaaagcaacctttgcctggccctgtaaaaataaactcatgttttaaagaaacaacccctcaatctgctgtgattcatttccttattttccccttagaatttagcatctttgagtattatttgaaagtttatcaagaaccttcaaattctttacattgatgatacttggctccatggatatgtttcaagttgctaatttgttcaatcatctgtcaaactgtattaaggaactaaggccaggaagtgctagcctgaaggtttctgcttttctccagaaaacatttgatacctaaacattggtgttttgagaaaatatgctttaaatactgccatctctaggagcttttccaacatggattaggcctaaatagctgagctggagttgtgtttatagttcttactgtttggctttgcagcactgcccttttcttctccaggtccatcgggatttaaggtttatattttagttcccatttggatttcatgcattctccacaacatgacaaattccactgaaacaagacttgtttctctctttctgtatgctgtgtacacacacaggagcttaatatggggctggcatacagcaaattctttgtctggtaacgtagaagagaaagctttggtcctcagatacttaactttttaaatctagaaatttggaaattatagactcaagccacaggggactaaagaacttgtaggaataccagcttcagccaggaaaatgattgacagatttctgaatttgggtgctttggctaacctttgtggagcaccagtgtcggactcagttcctgtcattccatgtggctagcccatgtttgtgccacccacctgatatctgaaagcaattctgctctttttcagaccttggggtttgcaatgtcttgagatgcccctaataatttgcatcatctgtgactgtaaattatctttgcaaagaagcatgcttgtcctctggcttattaaatgcctgtctgaggctctgtagcataaaacctcctcaactggttaacctagagaagcaaggggattgattgctaagaaatacaaataggaaattaatagcagctacaggagaatcttttcaaattcttaattctcctttgcagacacagctagcactctcactaacaaaatcctgtcaagtttagaataatagcttgctaattttgactatccaaagattctcaaagatcttaatattatgagatattagggaccatcaaactaatgatgaaatactttttaattaggtgcctgcttcaacattaaccaaaataagacaggaattttaaaggttgatttttgtttgcatatcttcctttagcttctattcccttcaggataaaaacttgtaatactcagtgttagtttttaaaaagcctctttttaaaatctcacttgttcatatgcttctgtgaatgtctgaggtcatatttttggaaggcccatgtgaccatgcagctatagactttgtgagtgataagaatgatatttaatgacaacttatactcattagttataaaactaatatgcatatgatgtaatttatgtcctataatatccaagtgagtaaaagagggctgatcaccttcagttcacagacaaggacattaaggatcaaagagctgggacaatataacgccctgccctgacacaatagctcttatctgattacattgtaaatccagcagttgtccaggctccattcagccccttccacactgtgtgcatccttaatacatgcatgcattgccttgagaattctttgaaccttgtggttcatcaatgcactcatggaaattacaagcagataggctcaaaacacagcagctgtaatagataggaatgtactcactaattcaactggtcttccaccaactccatctgtgatactgagtttgtctcagcttccctttcctcattatgaatgaagattataatatgcatcaggatgagagatgttatacatgttgtcttaacacagtagccaaacacagtagatttcataatcagttattattgactgcaatggtattactactattgtcaatttgtggattttgttaaactatttttcataaaggagtagtaaaatctctaagcgtcagggcatgagatttaaatactggtctactaagaggagatttttggagcagagtgatcccagtacaattcaactggctttttttgggtgtgactcagagaaagatggaatgacagcaggaatccactgtgactacttcagttgtggattaaccacaggcaagaaagcttgaatacaggcaagtttgaagtccatacctgtgctgctcatctcattcagcaaacagttctaggtcttcagagaagtccaagatggattgactaaggttgaactgtggtatgtctgtaaatgaagttgtaaattatgttgaaaagtttcactaccctgaaggaaagctctctgtgaagattcagaataattagtaatcatcactttcagattcattcatgagaatttataataattttgctctctaacatttgtttaagcacctaggtcattgccaatagagactctactctggagtcagttttgagggacccctgccttaatgatttgattccaatccatcaaaagtatttagagaaaaatggctttgctattttctgaaatatttgcctggaagttattcactgataatggatttctatttgaaaaccatttattcccaactcaagtatttactgtccagatggagaagctctcaggcgcagaacataatcttagctcataaatgttttctattaatgaccttgattctccatctcaagatgtcttttcaaaaacaatatgattgtgggtaaaagcagcgataacaaccctgttagcctgtggaggaatacattaatggtctcggatggattcttgacagtcatgatgatgagctgataatggaaagctttagaataaaaataaaaatactagttcattttgaaatgtgtcatgtagtgcaagaaagatagatgatttcctacagctttattgagatataatttacatgccataaaactcacccagcatatttgcacagtgaaagaatctccagtgaatgtagaggaccatgtaactcccaccacagaccatctttagagcactccagtacctcccagaactacttggagttgcttacagtctctatctttgtcttcatccccaggcaaccattgatcttcttcccatccttatcagtttgccttttgtgtaagtttcataaaagttaacattattttggaaaggatgctaatttacttgaatagctatagtctcaaatttatgatttattcaatgtagtttaatagttaaggatgtagttggactccaggcagttataattacattaaattctatatcctattagggtcaagagatttggctggtctattttctgattggttttagaataattcggagtttggggattttagtttgtgattatatctgatgagttaatgtggcagtgacttgatgtacagtcacaaaaattctactctcaattggtaccgttttccagcattaaggtgcatttttaggctaatatttgtgtaggttgagaatattctgtccacattagagacaacagaaggaaagtatgaacagagagagaggttaagtaatttgtttgactacacaatgctgccagaacccaaagtctgtgttcagggctgctatattaagatctatttatcttgaggtactatagtaaacagacattatggcttatagcatctacagtgtccataagtttctattttcttccatgctggtatatgcttaagaaaaagggttagttttaattatgtgtctgctcatgtctgtgtgtatatgtgtatgagtgcaggtacttgcagaagtcagaagaggctttcagatctccaggagctatttgtagaggcatttgggagccaccagacatgagatcggggaattgaactctagacctctgcaggagtgatacatgctcttaaacattgagtcacattttcagccccaatgtggatatattcttgaagctacttcccagcttgccctttcagtccctgtgcatattctattatgaagagtatgaaggggaaaagagaggcaacatgtttaggatatttaccaatccctgaggtgaatacagaagtgatcatggagctgtttgtgaaatgagagaggcaaggagagaagagagctttgaattatgaagggaatgagcaagcatgcacaggagaaatataagacaaaagaattccggtaagcttgaagcaaagggagacagttcagttcttcagttatgcctgaggtggtgatttcatgaataaagtcggttttgattaaaattctctttagggaagagctgatttttaggaagaatcctaatggcttcctgtaccagttggggctgaagacaaacgaggaagtctttggtctctagagcagctggtcctgaccccagtgggacaaaacactgatttaaggtggctacagctgactccactttgtttcattaaagatcttggcttgcaatgagacacccttgcttggatgccagtcctgctgcaaaggcttccgggttacaagccggttggggatgctgccaaatccgttgcctattcagcagtgaaatgaggtggcgctgttagtgctattgcttattgtgcaggtaccagtttgagagaatgaagagtaaccttatcttgaggattaactagggacttataaaagggatttcagagatagaaggtgcctagaggattctccagggagccatcaggaaaagctccttggagctgcaggaggtggcagaaatgtactgttcccatccacccaatgcccacactgcctggtctaggctccagacagcctgagtccaggtaccctagctaatcacagacatagtgggggtaaagccaacagggcagaactggtaacaatttctgccccaaactaggtgggtccagggagcagtgctggccaaactcatgtcccaggtggccaggagccactgccgtttacatttgagagactgctggatatgcccaatgctagacaggtgatcaagttgtccaacttctcattagtgttgctgctgctcacagccttcctttattacctggatgaaacctggaattgataactgactcactgaacgccaaaggagcttcagcacctgtaagtcatcacatcatctggctgcccaagtgaagtgaatccaaactgcagatgcttacaggcccttgtctcacatgtggaacagctggaagacctggagttgaggatgtgtatacatcttctttgggctccctggacccacatactaaatgattagagggtgactatagtactgggcaggatcgctggtgccaggatccagtgccatagcctgagcctttgtgggagcgctgttccagctatgagcatgtgcagtcaggcctggtagaacatgaggaggtgtcaacaaagagtatcagctgggcctgagcaccagactgaccctgacatggcgaactttagaaaaagaagcaaaggccatgaaggttaggacagcagcagcagctgtagtagtgtctcaggaccctgagtgacacttgactgaggaaccagctcctggcttaatgcagtgtaatccactcagtaggaaagtctaaaaagggccagaggttcccagggagtgacagcatgtggttcctcttctttcttccctggggatcccaggtccctgcttcctgcctactatattggtccccagaacatcctactgttcctctgaatcgatgatgggcctagttcatggcctttcacttccttcatccccaggcacagatcacagcttctctagggaggggaccctatgggtcacatttattaccactttttgatttatgtgacttgtgtgttccattgccctctttccctgccatgctccgcttttaggctctcagcatctgtcccttctctttacttagctaatgagcagttgggtaatcctgatgcgggcttgtctgtctccagcataacccacaggtgtttctttacagatctacccaaccattgaacatctatgtgcatcctatgggtataatctggagaacccctctcctggggtggaggactcctccaagccaatctgccatcattgtagtctggccactttcatcctaggatcttaccatgctaaattgtttcctttcttctcccctcctcttaggccccagaaatgctgctattttagtgaccctagaaccaaagaacaaccctttcttaaagatggctttttcttagctctgatcatcttggaaggctgtggcaattgaagatttccattatctttagtacattgggttgcgaaggaagggcaatggagactgtataaaatggtatgtacgtatacctcagtataaaacagggcacagaaataactatgagaagatcccaaatatgctctagaaagggggcttttagggttagtcaactgtaccaaatattttctgtaaactgcagttcagccttcagttgcacaagtggtttgaagtcatgaactccagtagccaatttaggtttgtcatttaaattagaaacattatctgacttttgcatgtggggactagtctctgttaatatatggtcccacagtaactagggattcaaaattaaacacatgtatgtatgtacatacgtatgtatggtatagatcagattaataaaaatccatgtaggacaacagagttttggaaaatgcaccataagtaatcagacaggtggacaccactcttgtgcggtttatttatttgcataacccagtgattctacacacacataaacaaaatgactgagttcatagtggaggccctggactggcattgtcagtagaatctgataattgttaaaatggcaattctcagctatttccccaaacacactggatcagaaacccaggaaggggacatagctttgaggtccccacaaccctctaggtgattctgacctggcctacagtatgagaactcctgacataacaggatgggaaattagcaggaatagggccaccgtgtcatatgtgctgcaaagacaaggaatgtggagctgaggcaaaggagcagaggttcagagcgagcagcagcttgtgctggtgctgtgctataggctggcaagcccctccttccccacagcatgaccatatcctttttacatgcccaagagttcttttctgctcacaccagatagaagtggccttgattttgggacacttgtggcccagaagtcatctgagcctatcattgttttagtaactaatattaactctcttgttaattattatttcttgcattaatttctcatgtatctatgtgcatggacatgtatacacacgcacacatccccatggaacatcctcaaatacaatttatttgaacaggatcagtgggtcatttgtgccccacacattccctatgctatcaccttaccttggtttccacacagggcaatattacttgagatgactgatttgtttcctgctttttgtctgtcttggagttttgtgtaagttcacctgtgttgatgatggccccagaatgttgcctgatacatagtaggggtgtggtgaacaatgactgatgattttctctcttgatctagatgataaacaacaaggggacaaggtgtcatgtcaatataacatcacaaacacatgcaaagccaccagcattagaaaacaaaatggaatggcagtggtgtctgtgtttttattttgcattgatcatttgcatgcgcgtgtgtgcgtgcgtgcgtgcgtgcgtgcgtgcgtgcgtgcgtgcgtgcgtgtgtgtgtgtgtgtgtgtgtgtgtgtgtgtgtgtgtgtgatgtgtggttgtaaactatgagtagaaattccctatatgaaaatatatgccaaacagttaaaatttgtaacacaacattggtttaacacccttatctgaaacatttggtccctatgtgttttggaacctagttccttccatttctcagatcttgaagggtagcataaaagatgtatagattcttataacatctctggctgtttaatgtaatgttccaaataagacattactctattgatacagaaaaaaaatggttacttacctaagtagcgagaataaaatctacaaaaatctctgtgatcagttcaggtaagattatgtgaccaagagaatttcctgcaaatgttgcagattttagtttttagggattttcattttgaattcacatataagatcatttacagagaagatagtctataataacaattaatatttacattttaatttttttatgtctccagttatatttatgcacagttaacttaagcacttgaagctctggggtattaaatatatttgtcagagcattgtgcacaaatcaaatctaaacctgaacccagatctagatgaatttctcttactcacatatttgcatattagtgctagggggcataaataaatgtagttaagtcattttttctcatacgttgaaggacaaggagaggctgagagtttacgcttgaaagtaataaggtcttttaataatcttgtgtgtgtgtgtgtgtgtgtgtgtgtgtgtgtgtgtgtgtgtagaccagagtttcatgccagctttctttctaaatggatttttgccttgttttttgagatagggtctttcactgaaggagctcattgattggttagctgtgatggtcgtcaagcccccaggctcctcccatccctgtttccctacactgagattacaggtataggaggcataggcacatactatggcactcagtccctcccttcctccttccctcttaccctcctttccttccctccttgctcacttcctcccttccttcttttttactctggttctcacacttaggcagcaagcagtttgcccactgagtcatctccccagccccttaatgcctgctttgaatagttccctcatgctttacaccaccacctggtttcttatgttttgcaaccatttttcttagaaatcacttttgttgcagatttagaggcagttttctaatagtctctgctttcctttttcaggtcccaaaatgttttggctctccgtgttttttgttatcaagtacctaagtgcctgtaaagcacacttcctcaggttcaagccaggggcactatttacttaggcacagctagagtagactttgattccccatttctttagttgctttcaggaacaaagtaagcgatttcatttaaaattattagttccagttttacttctgtcttattcactgagggaaaccttacagttagctgagatttcaagttattttcagcacagctacaaggaaattctttgacagcatccaagcatgcttggctttgctgcctttggtcaaaccccatgtaacaaggtgagataccccagggagcacagtcccatccaaagagtcactttgctctccaccagagctctttccccatgccggacaatacacacagatagatgccagatacatttaaaaaaaaatcaaggctctaaaacaaaactaaggaaatccacatttgcagtagaagcaggatcctttgcttttctaaaggcagatggttccagaaaaagagaaactgaggacttttggcagagtcaaaggatatggatgtaaactttaaatattattttcacctttatttcagaaatagaaatgccatgttattaaccatggtgaatgttataatttgctttcccctagttttttcatgctatctttctgtaagggatttgtatgtggaattacaatctcattggaagtagataacaatgtctcatttactaaacttattaatagattattttaatcttcctaatcataataattattaacacattgggtgcagggaagatggctcagtgaagttcaatgcctgttcattacctttctgtggctgtgataaaattccatgaccaaagacaacttatagaaggaaggatttatagttcctgagggagagttcctaatgacatggcatcagggagccaaagcaggggctgagaggtcctatctccatccacattcatgaagcagagagggaaatgtgaatagggtaaggctataaattctcaaatctcaccactagcaactttctcaagcaaccttccacatagcacaccaactggaggccgagtgttcagatacctgagccactatgccatgtgggcatgaagatgtgtgttcagatccccagtaaccatgtaaaagccaagcatagtagcacggttctgtgacccaagtaccgagaagacaacaaacagctagatctctgaaactcactggctagacaatcttgttaaattagtgagctccagaattagtgagagacactgtctcagaaaataaggtggcgaacacaagtatacatgtacacccccaaatgaagtgagttgtacaaattacttagatctactgtgatatttccataggtattgaccatgtgtatctatccttgtatgctcacatccctccacctttcccaggtcccagtaatccctttttagaccatttaaagacatgtgtatgtgtgagggggggtgagaggagagggagagggagggatggatgtggaggataccataaaagagcatcaggtctcctggacctggagttacaggtggttgtcagcctcccaacatggcttctggggaatgaacgtgggtcctctagaaaagcagcaagcactggtaactgatgtgttgtctctccagcttcagtaggccatttttaaaaaggaaattacaatagcttgagaggtagactaataggggagaaggagaatggtgacagaagaaataatgtagacataaaaatgatcccgtattctgtataattcccggctgtctaatcatgaggatacagaaatgaactcttgcaccccctttgtccacgaatttctgtctgaggctctgctcagacacaatattgttcctgaagatgaagttgctgctgtcttacactggtgtgtgtgtgtgtgtgtgtgtgtgtgtgtgtgtgtgtgtgtgtgtgtaaagtatgggtctttcatatttgagctctggagtcagagaaacccgaattcagatgtaaattttgctaccagtagcatctttcactttttcctatctttcatttcccattggtaaaattgagttgagggaggagggaaaaggacagcactaggcaagaaccaggtatctggaagaaagcctcttacttgaaatttatattttaccattatattctgtgttactttaagcaagttgttacggtgttctggttttgcaaccacctcagagcccccaaataacacacaagacaccatattaattatgaaactgttggccaaagcctagggcttcttattggctagctctgacttaatttctagcccatttctatcaatctaagcatttccgcgtggttttatcttatggagaaatgtctggagacatgttactcctctggctcctacatcttgactcactgtgcctatgttgagtcctccacctctcctagccccacctatcttgtttccctattggccaacagtgctttattcattaactaagaagagaaacatatttacaaaatgacatctcccatcatctcctcttttctgtctaaataaaaagaaaggttttaactttaacatagtaaaatcatatatatatatatatataatatatatatatataatatatatatgtgtgtgtgtgtgtgtgtgtgtgtgtgtgtgtgtgtgtgtgtgtgtgtatagcaaaacagttatcaagtaagaactatagttacaatatttagctcattaacacttagcaagatttaaagaaaatagtctaacatctatcctatctttgtgactcaaaatcttatgtgtaacttaccttttatcataattaagaaaaccataaccataactatctatcttcaactccatcaaagaccacagaaggataatatgtaaactatagaactgacagagacaactcactgcctggtcagtcatctgaagttcttttgtaatattctatctttggcccataggccttagtgtgtccagcagactcctcagcaaagcaagaaactttcaactgtctgcctgtattagcagtttgttagttccttttctctgtgttttgattaagcagggaccctgtagcaatgtcccatcttgttttagcagtcacttttctgtgggtcctgcatgtgtattttatagagcataaagtcaaacaatccagacaagagctcagatggctagtcttgccatattggaagcagactccatgagtttcttcaatgtttatcttcccttctgacgcagttggtgtttccaggagcagttgtgtctactgtcaagaaaaaccctaaacaattttaaatgccatattctgtaggtctttgaaaagtttgaagaatgcctatccatttgaaatatatctctgtatatctagaaaacctaactaacctaactataacttttgactattataggtaactatctataatctgtacttaattatacattcaatttttaatgagatatacaaacacaattcctaaataaaaggagaaatatacatattacaaaattgaccttaaatttgtatcattaatgaaaatccactccaaaacaaagtattcttttctaatccatagtccccccctttattttttattttttatttttttggttttttgagacagggtttctctgtgtagctttggagcctatcctggcactcactctggagaacaggctggcctcgaactcacagagatctgcctgcctctgcttccctggtgctgggattaaaagcatacgccaccaatgcctgactcatagttccccttttacctttaaaaagaaagtggttgtaatcattaaccatttataaccaattccacataaatgaaaacaaaaatttataaacaatatttggaaatttaggtgtcatttattccaaattgcttcctgctggtctggggcactgtttatatcatggggatcatgacaaaacacagaaacttggccaagtccttgtttttgtagtctgtaagacttcattgtctcaattgttttagatgttggatcacctgggatactatttcagggggtcttgcttcatcaaaccatattagtctagaagaaatccatagctttacattttctgtggaaacacaagtaaaaactcttttaccaagtaacctgtccttatagttaaagttagaagtcaaagcatttttaaaaaatataagatgtattaattcagcagcatttatgatcaaatgtatttagaagttgtcactcatttagcaatcataaaattcaaagataacaaaataacatacagtatctaggttctctgtgtattttccatttttatgtgggttatttatttatttatttatttttacagtgttactctgtttttttttttttttttttttttggtctgtcctagaattcactctatgaaacaggcttgtcttgaaataacagagatttattgcctctgcctcttgagtgctggggttaaaggtgtatgccaccatacgcagctactctatttttttgttttctctcctaagcctatgtatatttttctttattgtaaatctttatctttcaaataacacaggagacattatattagttatgaaactgttggccaatgtctagggcttcttattggctctctctgacttaatttgtaacccattgctatcaatgtaagtatttctacatgatcttatcttactgaagaaatgtccagagacaggtcacccctctcgattcctacatcatgactcactgtgcctgtgtttcccagaatcctccacctctcctagtcccatctatattgtttccctattgaccaacagcacttcattcattatccaataagagaaacatatttacagaatgaaatctctcatcagagttgctttacatctttatgcctttggtctcccatctgtaaaacaggtaacagtagtatgtgttaggtgaatgaaacttagaacagtgtttggcagacaaaaagcatgtaccagatgatgttacacttcttcgctgttaactacaactggccttgcccacagggcatattcagctgtttggaggtgtttagtttgttgcaatcgagtggaggatatatggcatgggtattactaaaaggcctaccatgcaaaggcaaccacaataaagacatgtctgtcttaaaatgtcagtgttgtagcccttcagtagcttaactccctcaagactaggagtctgctttctctgcccttttccaccagggttccttaaagtcccctagtacctctcctggttgtcctctcctgactgttttctcattctggatggagtgccactgttgctagattctgagtggtctctgcttgggcattatccatgttggtagttttacatacatgatggtatataatactggctaggtatcttatttatgacatactagggaccaaggtttatccccgaggaagccatggagactgtagccttatttgctttttctagtatcttagggctggtggtatctgagagtttgaggcccatctgacagactagctctcaactctacttcctttgaatcatcttttatctcccttccataaggttttcctttctgttcaaagctttctttctttctcttacccctgaactgcccacctcctgtagagcagcttatctctcaggaatgtttgatccagcttatccctcttgtggaagcagaacttgggttgagttctgcgctaatcctttggaaagttcacaagctagaagggacataggctactgtcttcttcctgaaggctgttagtgtctcaactttcagtgctttgattctctgttggattctggcctgtgtcttgagaaagtgccttgagatccctcctcttcatctactccccaagtgagctaggatgagatcagcttttgtctgtgatgtgatgaggagctttcaggctttttgacctgcattaagctcttgctctcttccttgctgaacttgggtgagttttcatctttctgataccaacttccactttctgattaacagttgtgcctcagatggttaagaggggtatacacgtttgtggcctggctatgtttgaatgcagcaagtcacttttgttttgtttatatttgcagatgaatttttcagatctgactctgaaaaaaaaaatgtgtgacaactgaacttttctcataggatggttgcattaaatgaggccctttgactaatttccttggaatggcccttttatttacccatcctctcacctttcctgtgtcccttaggtgctgagtgggtgagagcctacaattgggagtgaattgcaaaaagctatccacacctactgcaaccagatgagttgggctttaaatagattcagggcttaggataataaggttcctgcttcttatttgccatcagattcagacgagaacctttatgtactatagagtgagcctgtgtgcagggaatggaacatgcccacatctccaggatggttccttatatgtggggaggacacagtgtgggaagatagaggcctgtctcatcaacctctcctagcctttcccagttctggaaaaggagggcatcattatgctaaggctgggacttaacatttgaggtatttagaaaaccaaaccaaataattcaaaccctcctttatgctccccactttttaaatcaccagatcattctcaaatacaacattcgaagaattcccactgtgctccacttggcaccctctgctcttttctgagcacccttccccactttgcttctgccacccacccctgctgaacttcccttggattcctggctgtttttaatgccttaggagaaaactggaaggatctagaaatgtctgtcactccagggcaaaacttgctagtgaccagtatataaggaacaacagatggcctgacttaggccctcacagaggtgttgttttattttttctaaagttcttggtgtgaggtaccatcagtggggtgttacctgtaactcctgtgtgactttttttccccctgcagaccacttccttaagatgttcactgcacaggagtccttatcgctgcattttctgccttgcatcccggcctaaaatggctctttgctgagactttctccatatctgaacttcctgttaatgtcacttcatattcctaaggttactctgaaatgaggatcagttgtgcagaatttattgaagaagtcatcacattataaaggaagaaaaaatatcctttggcatagtttacgtgctgatagtaaattttcattgccttagataccagaatatccataactatttcattatagatacatcattttaataaatagcatggcatcaatgttggtattttttcacttagatttaaaagtggaaataaattaaataaagtaggctgtgctaaaactttacatgatgactattatactctttccaggcccatatagaaggtttcagctaccaaatgctaaagaagtgcttgtagactctcttgggatgctaactacaatctattctcttcagcctctgggaaaatagtcttcctatctttaaacattcaccctgaggggaacagcttagtactaagtggagcgagatgacctatattgaggtattttttaacccagggctgtgtggagtaaagttagtgaggaattcctttatattgtaaaaacttatgtgcccactatgcatcagacactctggtagataatactcataatgagtctgttattagaatatgctcttttctctggatgtttggcaggatgtcctccttgtcccaagagtactgacatttaaaaaaaaacttttgtttggaaaactttgtaaatgagctccatatcttcactgctagcccgtctttcctcttcccatgccctctaaattaatgccttattctttattgtatacacatatgtctgcacgcgcacacacacacacacacacacacacacacacacacacactctaatgaatacatatactgttgttcatatgtgcatgcccagtagatcaggcattttatgcagagcccatgcctagaggctaccaattctccctctctcagtagccattgacctcatgtagctcttcatctaggggtggaaacatggggaattttttcctgtgtgtgttgacctatcagctggtggtgttcaggcaatcatattgagattttgtttatgtgttacacttgttatgatgaggagagactagaaacaggcatcctgggcctctggctcttacaatctttctgcctctcctccatgattttcccaagccttatatgcaggagttgtattacaaatgaatcagttggggtactactggacctcaagacacaaattaatagcccaacagtggatgatttcagtatccacaattcttcaataaacaggtcatcttggtagtcttcctggcatttttagtgatctgcatactggaaatataattccatgcatgtggtttgcctcaccatgagtcctttagtatttaaataagaaaatagggaaacagtaggaggttacaaacacaggtcaagccctgcaataggtagatgctctagacccttgacatttgtcgaggagtattttggaaaaatttcaagatctaatagatcagatatgacagtgcttaagaaactatattcagctacccagaggaaggctttgtgatctgctctctattggctttgaatactacagagtgaatctcccccatgtcaaattatattattcttcactaaatatgttatatctaataaattacaaattttgtcttggtccataggtcctgcaacttgactcttagtttaggtagcccatacttgtacttagtgtgtatgtttcccttaagcaaaatgcttctctaactctttgtgggtcaggagactttcaggtattgggggggggcaatgacaaagaaactgacagaggaaggtgaggtagatttgatactcaaatcatattgacaagtgggattccaaaaagaagacagaaccagtatgtcaagaactaccctggcccaccctgaccccagagactgttctaaacccaagtgtccagactcatgggactgtacacaaatggttcagagttaattttctctgaattctgtaaccatcttcacagatacaaaaatgtcttttatttcaacatgagaataaggtagagaggttttagccacgtggaagtttaggttttagccatagagaaatttctggctgctcatagcctgatctactacctgaggcacaaaggaagtttgggaaactcttttcttgttagggactaaatgtttgtgtccttcagaatttatatgttgaagctcaaaactttgacacactccatgtggttgtatttgaagttgggtctttgaaggatgtaaataagattaaatgtgatggttcagcaggtaaagacacttgcctccatgtctgatgacctgagttttgcccctagaaccattatgatggaagaactcactcctgcactcctggcctacaaacacgtgctgtgcctcaggcagccccccccccacactataaataaaaacacttaaaaggttaaataaagtcaccagagtggaaccctcatacagtagaattagatttcttatatgaaaagatagcctgtctccctggctcccaccatgtgaagtcagagcaaggtgtccatcaaggtataagctgagagaagcctcatcagatactgacttggctaccaaattcatgttggacctttcaccttcagaactatgcatattaatgtaagtttatgttgtgtgaaccaccattggtgggttgtgtggtaacagcctgggcacagacacaccctcccctgagattggttccagactatgtttttataattcaaaccattcgtattgtgctttctgaagttgaaatcctatcattttagcatactacatgattttattctaaagttaaagataataaacattcagtggtctcacagaaggaggaagggacttcctccatgttttaacagagtcagcttaaaacgagagattgttaaggatgagagataaaacacacatagattcatgtttctttccaaatgtcactgcaacagcattatttttcagaagaaaaagttcaattccacaaggacaaagaaaacagaattggagatcatagtgagaatattttagaagctgaagaaggatgtaagagagagacttctgatatatcagactgaaagaaactgaagagagggggaagctgagaagcaaatggattttcattattgaatttcagaagccaaggggactatgaacactttctgccttgcagtctggagtaaatgtggatagcaaaggggggttgtatgttttaatatttgagaaagaataagaccctctttgattctgagaaaatggcatgtacttcacaaccagttagaacaagtcatgattattgttgtcattaaaggctttgctatgtttagggtgtagatacaaccaccatggcaacttccagccatctgcatggcaatatggcacagagttgagcaggtatgagtgacacacccttctgtagtcttgttccctgcttataaacatctctagtaggacaaaacattgtctcaaaaacattctctcatagtacaggagtaagagaagcactttgctgggatgttctcctcgttttaaccactaattttatattttaggttttattcttttcattaatgtgtttaacaactaacacaacagtttctagaaactaacagtctgccggtgtgaactaagatgagctgaacttccgagtgaagcatatgatataagaaggaaacacatagactgagggtaggaaagtacttcttaggtaaacagaaagaagtcagggaatgcaatttgggaagcaaaccatttatcttaaaagcttcagagggagaaaggaaaatgctgtatgaatgaatcatgaagaggatgctaccaaatacaaggaggggcttttggagtataaagccagttcttggggtgggggtgatgaagaacattatggaagaatgaaaattccaacagaattgaggaaatagtatagaaaagttggacaaatggcagagaactggaaaatttaaaattggaagatcaaaggacccatctgggagataacaataggaagagaaaagatctaaagattgattcaaccaaattttctggaacagttcttttttgattgaaagtgctcaataggagctcaacatcatgaagaattagactgagtaataaaggtgtttattttgacattttagagtactgctatgccatcatagcaaaaatttctattcagaggatcaagcagcatggttgctttatgttaccccatagttaaagaagtttcctagtgctttcagcttctaaaaccgcgatgactacctcaatttggtaaagtgtttgctgcacaagaagaagaatcaatcaatttggtaaagtgtttgctgcacaagcaagaagaatcaagtttgattcccagaacatacttctaaagctggtgcgtagcttgctcttgtaaattcagcactagagagacagagagaggtagattcctgggactcactgaccaacgaatcaagttgaaatggccattaccaggtcatcaagaggccaccatgtctcaagaaacaaagtagatagctggccacagtggcttacaactttaaaatcccctgcactctagaggctggtggatttctgagttcgaggctaatctggtctatatagtgagttctgtgacagccagggctatgtagagaggcctggtccccaaaaacaaacaaacaaaaaacccacagaaactaaagccaaagtacattgttcctgggaaatgacacctgaaaagtcaggacacagtaaaattgtaaaattgccagatagcatgataataactgaaaaacatttccaatagcctgagtttcaggactttgatcttctgtcctccctttctctgtatggtaatggtgagtatgctcaggatggggggtggggtactagaagagactgttgtgatgggaattcttaagcagatcaacacagacacagtcacttcatgagtacaactgaggatccagccccagagccatgggtccccactacagaagactagtgctgttgggagggatttcctatagatggacctgattgcacgctcaccagaggacatgtataatgtaaggagaggacatttacatgcctgggggagagtctgatgtaaatacataaaacagagaaatcaggcacaaaaactaagccggctataggattaaaaggtgattgacttttctaaaagggatgattgcagatacagtgtaacatgaggaaatgtggttaattagcatatgaattacctatccatacttattatcgtggtgagagctctttatatgtactctctttaatttttcttttagggatacagaacttagggcatagctgagtagtatagagcttgctcaaccagcacaaggccctgagctccattcacagccctagaaagaaaaagagttaagaagaatccaatacattattaactatagttaccatttttgtagaacagatttccccaagctaactccttgtataaattttgtgttctttgattaccatatcttcctctcactctgcagtaattatttgcaattgtgtcaattttgcaatgatacaatagtgtagtatgtcaatacaaaaaatgaaatattcagccatggtgtcatacaatgcaaaacaaattgtcatacaatgcaaagctaaagagaatgaagaagaaattaggagtctgattggcaacttagggctgggtttgtagctcattggtacagtgcttgctttgtatacaggaggactagatttggtccatagaatcatgtatactgggtgtggtgctgcacatccatacttggagagaggagccagaaggctcaggagctcaaggttatctttttggccacatagtgagtttggggccagcctggtctaggagagattctatctcaggatccacctctcccagaagaatatgaaagtattttaaaataaaataacaacaatgaattggaatatacaaggacacattttaaaaaaagaaacgtgcaacaagtttttaaaatgatactttttcaagatatatactgcatgtatgtataatgaaaattagggatgtagttatcccagattaagcatgaaggcactccatgatcactaaatgtagctgtttatttcatcaggaggaaggatttcaaaggtggaaagtgtgtgtgtgtgtgtgcccatgcatgaatatgtacataatctattttaatattttatgcaattttctaaaaaatttgaaatgtttcatgactgaaaagtggaatgtgtactgatgtttagcaaactgtcatcctaaatctggagattagggacaaactggctttctaaatttattttccttttccacaggaaataaaactttgttcttgatttgacaacacataattattaagccaattagttttcatgaaaatgttaattcaattttgtcttgctgtttctgtgaagatccattgatagttatggacagtgcctgggctgatggctctgtggatgggaatgcctaccactcaagcatgacctgagcctgtgtctctagcaccatagccaaggctgtctatgatggcctgtagcccccagaattgcagggtgtggagacaggaggattgctgaggctcggtgatgagtcagctacaccaaaaagttgcaagctctggtttcagtgagcaaaccctaatcaagggaataggatgataagtgacacacgcagtgtcaccctctgacttttacccgtggaaacatatgtgtatgcaccaacacacatccttacacacaaacacacaactaaaagagattattgataagacatacaagacttagtgagcatgatgtttatttgattgacaaaggacatcaaagctgataaacatatgatctgagtgaagagatgatttaaatatatttattggcttgactttacagaagacatgactgaagtataggagcagggcagcaatgaacagtcatgctcttgttctctaaaaccatttcctcttagaagataattaggttcaaggtcatggttagggcaggaccctggaatcagagtgtggagtcccaatccatcaaggttaaatgctattgaattctggctctcagtttcttcaagccacaaaaaggcaatggactttacaggactgtcacaactaaattagttatccctactaaaacacatttcagactgtatctgacacacacatagagaaagtaatttcttaaaaatgttagcattactgaaacttgaaaagattagaattacagctcagggggatccatcactggaaatgggttggatcagctagagacacacatgcacacagagtacaagcctgagctttgttttgctggaaaataaaggagtaggggaaactccctcatgaaatctcagcttacaattacagcttaaaccagcttcatgaacaaacaattttcaagaaatcagtgccttttctagaagaggagaaatctgtgtcaatcatgtttcaacttgcacacgtatctgctctccccatcagaagaaaccaggttcactataaggttccccataaggcagctagagttcccagttacaagaaaaccttgctacctataaccagaatgtcagtgtgaaacttggaaacagccagaagatggaagttacagtttgaaaccttgatggagacatcagagagaaatatcatagtgcctagatatccagttactcactaaatatttattgagcatctattgtgtacttcacattgggtgaagtgttggagacacaagagtgaacaggtaaacgtttcttatcttcaaaaagctagtggaagtcatacagtcatacattgagagcagatacaatagtgaacacaggcctactacagcaggccagtctggcaggaactcttctttcatctgagactgtactaacaagaaagaggctgccaggaaaagatcccagagaaaagttagaggatggggaggtgtttgtgagtaaaaaaggccagcaggaccagaggatgggatagggaatgcagaaaacactgtaggggagccagtgagagagagaatatcctcagaggccatctcaagagaagaaaaggcttccaaacagtatctattcttcattgaaagctcatagaaagactaaggtttcttccttaacctgctgaatgacacctgtaaaagtaccacaactaacattgtttgcaacgatggatgagagagtgaacctctcaagaggaggttgtgtctatttatcctgcagtggcatcccaactcagcagccagctttaggaaggtttctcacaggtataatgtggtggttgtttgaatgagaatggcccctgtgggctcccatatttgaatgcttgatctgccgttgttggaactgtttgggaaggattaggaactatgaccttgttggaagaggtgggtccctgggagtggggtttgaggtttcagaattcccagttagcagtcactctctctgcctcatggttgacgatgagaagcaaactttcagctactactccagtgagatttttgttgccatgatctccaccatgatggtcatggacttcagccctctggaatcattggccccaacattaaatgctttcttctatacttgatcatggtgttttgccgtgacaatagaaaagtaactaagacagaatttatctgactcacaagcttaaaagtataaatttctatctcaaaagaccagaaaagaacaaattaaagctaaagtagaagagaagaaataataaaactcagcaaagaaatcagcaaaacagaaaaaatagaaaaaaaaggaaaaatcacttggcttcatgaagaatgacttttgttggaatgatgctggggtgaataaagaaagggatgccatagaaaccatatgtgatatcagtctgccttcagtgtgacccctcttcattttgggaggtatctgtagagtggggagaacttatggcatctttgtgtagggtttagaggcatggcccagttctttcttaggaaatgatatgggacagagaagccatatgtgctttggtggactcatgaatattcagctttggagagctggtgagtctgaggcctccagatccttgggaatagagagctgagccctgctttggagacccttgcatgttgccaaaggatttatgggtttattcaataggaagaatcatataatttgcattcacgtgggaaattgcaatggtaaatttggggattaagttggagctgtgtagggtaatctgaaatttaagggatttgttggttagggaagttggataaagaaagttagcttggcactggagaagtagaggtgggagatgacggaggcagaggacatgcattaggctgaggctactagctgggagtgagaagaggatgctcccgacgagctggaagacttgcccactactccgttccctccagtagtactgtgtgtcgccaggagactagagctgcactaatgattcaaatccatttgtttgatcctaagcaccaaaaatgtatttgtttagtttctttaagtactttgtatgtgtgtgtacccactccatgtatgtacatgcacacagagactgacattgggtatctctcaaaactcccacttttaaaattttattttttatgtgtgtgaatgccttgtctgtatatatgtgcatgtaccctcatatggacttggtgcctgtggaggtcagaagaggacatcagataaccgagaactggagttacaggtagtgtgagccaccctatgactgctaggatctgaacccaggtcctctgcaagagcagtcagtgcttttaaccactgagccacctgtccaacatttcttaccttatacttgagacagggtctttcattaaacctggagattgccaattcatctaggcttgtggccagcaagccccagaggtgctaccttcctagccataagattgcaggtgcatacataccaccacctctggcgtttcacgtgggtgctggggatccaaactcaggtcctcatccttgcacagggagcactttactgatggagtcatcctcctagctactcttcatgcacttttaaaacagagcctctcaaagctattcgatttagatagagcttgagaacactgaattccaaatagatcacagaaagcttcagagccgggagcaggtggagttcttgtatgcttctactctgaaacctttcttcattagccatgcttcttattaagtgtgagcagtgggggtttcatgctgttatgtactgcttggagaggcaaaggaacccttgccactgctttcagtgatgaagtcactgcattgcaggaggcctgtgaggttggtgctggttcagggagctggcatagggaggctgatgctcacacctgagcagccattcccacattggtggtttgggtagaagagtcctcctatcaccgctctaccatgggctgagttctggcttcttgcactgaacatctttcaaccctgtactggtttcctaggagacactgcctcaagtactgtctaaccaaattttgccatagacaccagttatacaacttctcagcaggaaaaaaatgagtttaaaacacttttttaaaaaagtaggttggtagaataatattgctgccttttctagtcaacaaaagagaacgaaagaaaaagaaaaaaaaccccaaacctaaaaatagagccttccactaaaaaaaaagcaaaagaagaaaagaaaattaaatatagtaaatgtcttgccaggttttgtcttcatcatgcactgctgtgtttggatcgccttgtttactttttgttagattcacaagcacatttgccagggatgtgacaactgaaatttataaaactattgtgacgtacatgacttgaaccagagctggctatattgtgaaaagtgtggggatgattgaactaccaggcaagcttgttttgttcagttgtttaattttcattgcatgttagagagatggggtagggactggagttaaagagctccatgtaatattttaaatttgcagctccatttaagtcacctgtaaacatatttatgtctataagtctgagtttggtgtcacagaagtaatttccatttcccccaaattcaaatgaatgctctcttaccttaaaatgtatatggatttttaaaaaatactgtcagaatattatgattttgttcagcatctaccagactgtgttcaggaagatttataatataaccttgcaacagttctatgggcttcaagttggctgcaggagagaacttaattttgttttactggttatcaaaatcatttactagctgatgacttggatcaatgatttcagagttttctgcagactttccattgttcttgtaagtcagcaggtgctgatagtcttttctcttcttaagttcaactctgatgcacagggaagtatatatggagcacagacatagagactgatttcagtcagtagtgaggttcaaagagggtaagttactgtctcaaagatgtgcagctagttgatgtcaaaagtctcacaaccctttagctactaagttcctagaatgttttgatgccttcccgacccttcaaagctttccagcaaagtgtaagactggcagcaaactctccaggctgttagctgtaaagagtcattgtccgattcaatcaggaagagcacccatctcctctctgccccctccacattctcactgcccccctcaggatgctatatctctttaaggaaagaagattgtcacagaaatattcaattagttggttgcttttattcatgttcacacatatatccagagcaaggggacttttatggaagcttgtatctaaaatacaccacaattaaagtgtaccattcgcataaccaaattacattagcatgtaagaaaagagaaactgttttaagcacaacccagccacagtggtaaggatattttgcacattctatttttaaaaaaaggctaaaaaaggagaaaaatctgaaatcctcaataaaacatctcattttggccaaatgtaacttgattccattaaaagtggctattttggtaatagcagttggagttgcacctatatgggcttcacgctcagagcaggatgcatttcaggaagggggatttccagagaagccctttggaaagccagactgcatataatatataccataatcttatagacatgtatatattatcaaatctgtattacctgatatacattacatatagcaacatgctgttatcactttcagcaaaattgtgtctcctccttgcctcacatttacaacacagatacttggctttcttggcccacaattgtcttgaatttagtatcctttaatattgaccaagtttcaggcattcttcattcatctctacacactgctgttactcaacactgtttgtattcttgtcaaactaatttgaacattacattacaccagcaagcacaagtcaggttagatctgtgaaaggactggaatgttggagagatcatggggaaatttctctctctccctccctctctctctctctctctctctctctctctctctctctctctctctctctctctctctcccacactaccagccttctctttccaagtctcaaagatagactttccccccaccctctctggtaaagactcgaaacagcctcactgattttttgttgatcgtaccttccaatttcctaaagagaagcagtcaacagtttgtcacctggactgttcagttgcctgttgtccatgagtgtgtgtgtgtgtgtgtgtgtgtgtgatctgaaaggaggaaggaagatagggagggagaatgaaaacaatgtaactcaccctcttattcttagtagttggaaagcatctttaaaagagtataattcctgaaaatgatgggtggtcaagtgtgccaagataattgtggtaagtgtgctaaatggttgttaaatagctcagcggtgaaaggcacgtgtttccaagcctgattacttgagtccatacctgatagaaggagagaacctactcctgaaagttgtcctttgacctccatatgtatgctcacacacatatgcaacaaataaaaatgtattttgaaaaatgtttaaaatgtaagaaacatttgttttacctaacaacagatgaaggggtaataaccccatattgtactgatgcaccttttccattagaatataaacttaattggttagcaaaagtgcctattgagactttttgtactgttttgtttctacagtgacttacagtctaagtaagtgaacaatacaaacaatactgatttggaaagacacacacacacacacacacacacatatatatatatatataatttctgaaaatacgttgatacgttgattaccctaagactaatggaaactaaaatatatgtacaaagcaagatggatacactgacccaaaaactaataacgtcatcaggtattaactgagagctttggcagggatttccccactttgctataacatgcctaccctacatacccaccaatgcatttgaaaagtatgttggcctttcttttttctttcagtataaaaatttcatgaaactataacaatattccaacatggtatttagtgcaacctaaacctgcattcccagactgtggccactttttttctctcaagaataagtgatctcttagtcctttgtggtctgtccttttatttatattgacacatacttggcaaattgcaggccaatgagagactcagtttcaataagatgaaatgatgtgtgtgaagaataatcctagcacttagggggcagatatctgaatttcatgctgtcctcttctacagagcaagtttcaggccagacagggctatgataaaaaaataccctgtcaaaaaaagaaaagaaaagaaaagaaaagaaaagaaaagaaaagaaaagaaatgtcacccaagaatgttgctcactgggttttgcaggcccatttgaaaaagagagaagagaaaggaaaggaagatggagggagttggaggagaggaggaggatgagtgagagacaggcaaacttggtagggatgagtaaaaatattagattctaatgaacttcaagtgtaagaaaaattgtaatagtaataaaaaagcacaaaatttgtctttagaaaatagtaatgatgaaactatagaggagcaccagggaaaaggtgagaagggaagagggtgagcagggtgctatgcatagagatgctgtgtaatgataaatctttctgccagctgcccgagttctgcccgccatgtgggcacccaaaataacacacagtgacctatattaggtacaaatgatgctggtcaatgactaggatttcttacttgcttgctctgtcttaagtatcaccacaattattaatctatatattttataaacttatctcattgaggacactggtggtgtgcatccactcttctcgggatcacatggcatcaaccgtccttactacatttcccagaaacctcctcgactcctagtctcacctatctttctgcctcattggccgagcagtgctttatacaacaaccaataagataaacacacacagaagggcatcctgcattaatgctgagtccatgtagagtggagtcaagatgaaaactgccgtcaggggctgatgctgtggatgcttgtgttcatcaggagcaggagggttttgttgtcttttgttttcttctgctgactaattggtaccttcctgggggttgttacccctacttctattctcagaaacaaaaacaacaaaatttagaaattatatcctagggattggatatttgcttgatttgtttgggatgaaattaaatagcaaatataagatcagtaagtggccgtagattgctgattttgacatatatcggtatccatgatgactggcagggctggcaccaaacatctttgaattttggcagctgtgcctcttttcttacacttgagaagtggagcagggggtacttccgtgattcttgcttccctctggaagagcaaagggtgatgacaagaccttcaacagcctgaactttcttgtggtccttcacattatggcttgcttgcttctgtatgaaatatagttggctagttctgaatggacactgcagtaactgtgggatgagcatggtctgtgtacccatgagaacaaaagtcatgtcatcagggcactgaaagcagcatcatggaccagtccccgctagagtcaaggtgagaactagctgggatttggccttactttattagacaggttgcaattctacatgtgaacctgaggcaagaacatctgcctatttctatagcaattcttggcaatttcttcatctctgctctaacttctgtgtcagatgggaagccatctggagttagcaaagcctttatctccagcaagcattgcctttaaggttccatgatggctctttgcatgatggcttggtgatgttggaacagggaacattgtaccaaatgacatttgagtttcttcccagcctgaagattctttaagattccaagttccaataaaactatttcaggacacagttaagattacagcagcaatttttaggtcagtcttttgtagcttttggccaaaggccattcagagggtaacatagaaaagggaaacagatatgatgggattaaaaaagttaaaacagaaaaatgttagggtaaactgtgtgacagtaggtaactttgaaaggtaaactctggtgggtgtagtattctgatcattgtagtgccatgttcttttaattatagagtaaaagataaatctgtcttaagtttaacacacacacacacacacacacacacacacacacacacacacacacacaatggcttctgctatgtaatgcttagatttagtgagtttctacattaacttgaattctcaaagaaatattgactgataataataacttcttttattattactgcacaaagcttgtgctgagtgtttttgtctgtactaaacagagtgctgaatgtttagtgcaagtttttttccataatttttaccctaaccccatgagataagtattattgttttcattagttttcaaataaacatttgaaggctgagccaagtagggaactttgcctgaaggcaacatctttgtttgaaagttgatctagcttctgcatctgctttatacagtctattattgttgccattgtccctgcagaatattctttttcatctgttggaggggaccatgttcattgtacttatttatggttgagcttgccttagtgttgacacatccttgcttgagtaaattaagtgaattgaaggcagaagaaacagcagtttggttttgcacattaagcttcagatgttttatgcactgatctcttactggaatgtgactgttaatacatgaaatcttaagcatgggttgcattgtcctgtaacaataggccttagaagaagtcttcattgttttctccttctgtgtcttagttaaggtttctagtgctgtgaagagacaccatgaccacagcaagccttataaaggaaagcatttaattggggatagcttacagtttcagaggtttaggccattatttttacagcaagaagcaaggcaaatagacatgttgctggagaagtggctcaagaattctacaactgtatctgtatcttacaccagaaagagcaagagccactgcacctggcttgggcttctgaatctccaaagcctgcacccagtgacacatttcctccaacaagaccacacccctaatctttcgtaagtagtgccccaagcattcaaataattgagctatgggagccattcctattcaaaccaccacaccacaaatatcattcattctcatcttccctccctccccctccccttatattctgataacacacacacacacacacacacacacacacacacacacacacacacacaccttcacatcctctctgtttgaaaagtatcctccagatgttcattagtgggattgcaaagtgtgctttgtttaacacattggttgcgccatccttattcatcagcatggttcacttttacccctctgtacctcaaataaacttaaatttttagttactgcagagcaaatgaaagaagatacctatactagttagctatcttataatctctcactcctttggcctaggccctattaaaacatttttatacatcttaattctctcaatgcttagagaaatctttctgatcacctagaatcaccaattaagttcaaagaaaaatctgaagtataaaagtgttttgcaagctcataatacagacatgtagacagttaaatgtgcacatccaggctggtgaatcacatttccatctacaaaggtcatattttgataaggaacatcttcacaaaacaaaaatatatacaggcactctccaaaggactcagctcatttcctgtcttgattctggacataattcaagatgatctctctagagaatattaacattcatggcctaaaaatacagcaattttaatctcatcaccaagaaaagcttttcacttcacagtaaggtcatgttgatatactccaaaatgttgtagcttttagaaccacatttagaggtctttaaattgttaaataatatttttgagtcattagaataattgagttaagttttcattaatactctagaaaaatacgtttgtctatgaggatgttaggtttcatttgcaaataggaaattactctttgctctcatgagaggaagccgtcgccatgaacatggacactgtctcacgtttcagcaggatcttcatacggtacatactacaaatttccctttgaaattatcctttcatatttataatcatttgggaaatatattgaaagtctttttgagtcttagaaaaaaaggctatcttacgaaagtttatttttgaaaagaatagataagtgtgtgtttacaaggtggaagaaattgagctgcatgaagctcagcacaggtgacaaagggcaatgggtctttcctcatcgtacatttatttctctagagaaagtgtctttgagctgagtattgatgacctaggcaagtattaggaagggtgaagttttgtctgtgtaaggaacggatgagggatatcaggattttctgatgttgttaaagttgtaccaaacattgacatcccctctttagagaggaaaatgtacattaagtattgcttaaaatcctaatatgaattttgacatataattataatatatttgtatatacttatatttgtatcttccctgtattccttaatagaacatattttgattgctctcacactggctttcctggtccctgttggagagcagcttgtcatctctgttgtcttcaggaatttcctgagcacccacagaggttctagcattttatggcttgcagtacccgtaaagtattgtgtgttatagacttacacagtgaagtcagcaaggtagaatctccaggaaattgctactatacatttcatttaagcacacatgctacatatgcactgaatatcctttagtcattttgcaaagatgatttaataaaaccaaaaggcaccatattagtttcctgtggctgctgtaacaaatatctcaattttagttccttttataatagtacatttctgttgttcaggtttgttagtcaggactctgatgagggtttcattatggcaaaagcagggtgctagtgcggttgctttccttctagaagatagatggggaggaactgtttatcctttccagtctgccagaactcttcagcttagccctttatatctctgaaaatatgggtgcctatcagttttcctcatattgcttgactcagtgtcaggtgcactggcctccattgaagacaaggatctatgggctcataatgaacccacctgaatatccgaagcaatctgctcaactcaagattcattcccttaattacatccccaactcccttttccatataaggaaatatatgctcatagctagagattaggcactggacatcattagggaaccatgattctgccttccccaggcatggagagtttttattaaaacctgaaaagaggtttagattgaagaaattattatatacatttgctactgcatttcattctaatttggggcccatgatttctttttctttctctacattctggatcattaatgaaatatgcaaactaaactataataagagaactacagtgtgattaactagaaaaaataataatatttatttagtactatattcagaaatgatcacttatctcactttatccttctactaactctttgaagaagttattattttttattgagaatttaaaaatctaaaaaatgatgccaatactagctagctagtaagtgacaataattagcaaaagcaggcatgatgtggcccaaagctgggtgacaaaagtcctagaggcctgggatatttacttgcaaatgtcatcatcacccatgagcaagttatcaacaatgatgtccattaaacatgcactaggttcaggaattgcacaagggtttactctactgtactccagctgggatgtttaatgtgtgtgataatatggtcctaatagcccaggactatggaactgtgctagcctgattgtacttagtattctttatattgatgagtgttggcagtagtcttaatagtgggtcatcaccattgtctgccctctgctgcatgcaatatataccccagtagccttaatagtgggtcatcaccattgccagctctctgcttcctgtactacatacatctgcttcactgtctgctgcacctgcagcatcatctcctcactaaacatttggcagaaagtttagaaacatctgttgtcttagttgaacaacggaccttttttccctctctgatgagggtagtactttgaacttcacaccttaaccttcttccagagtcactttgggctaagaccagagatctgaatcctttgaaccttaccttatcaagcagagggcaaggggcaaagccattatgaaaggcatattgtaaatgaagtgcagtttgactctcccctaaacacgagccaggaacccgccacactgcaatgtcacatgcaggtggttttgcatgacctcaacaggttattatttaaacaccagtctagccctgaatatttcaggttagagctgactggtgctaggcaaagtctttgacctatttgagaagaatgaaaattgacatagctgagttgattctttcaggtcccagtatgatcataatgtgatttgggatacctaagtttaagaatgctccaatttcctaaggggaaacttcacaatataagatattggttcatataaataaaaattcactatatgtaattccttattaaacatcttgtttcacttctgagaaaacaagaaggataaaaaggaaggaggaaggaaaaaaagaaaatgattagagaaaaggaagaacgaataaacaaacagacattggcatgaggaatctgatctattactcacagcaagaccttagctctcatagtctgcttaactgcttacagctaagtcatgccttcatactgggcatgaacaattgcatggactgtttactgtgactggaaaaaggcactaggtatctgtctctctatttccagatatgcaatatctttttttttttaaccaagtgaaaccaggcttacactggcctggtgtcttgtggttgatagatgctcaaccacagcattgccctacttgatgacaacatccaatctagagtatgtatctgctgtcttagagcctacttaatatcatccattaatagtttatgccctacaatgtagcatgaaaaagaaaaacccagagtcagatattggggttcaaactgaagatcagagaagcaaagcagccagccactatagacttctcacctctaccaatgctcagaccaaaggggcaatccactgaacctctgactgcatctctagactgcacttctccccaccaagcctcagaattctagactgttccctgagctccttatatactctctagtgctggaattaaaggtgtgagcttttgtagactaattcactctcatgtagttcagggtggtcttggactcagagatccatctgcctgtttactgagacctgggattaaaggtgtgtgccactattacccagcatctatagctaactagtgtggctggctttccattcttatctctagtggctttattagatcataatgtatcaccacactataatatgtcttttcccctaaaactcttgtactaacttatcttgcatttgctctctgcaataaataacaaacctaactagttctccatgattaatactctagaacttgtaggcattgactattcaaaagactgtttctatctctaacagagatgaggtaatcatataaaatgctaaagttctgcaataagattatatagctttgttctttaagaatgtatttttatgttcatgtcttaaaatcagcaagaatgcaagggcgtacaataaagaacatttaattttgtactcattccatccttaaccccaaggggaaacacaacatgggggtcattctattcattttgttctgaagcatgactgcatgctaatttctacaaaaatgtccctgctctctggccatgcttcttttctgtgttctgtcaggctttgccaacacacagttctttcctgagatcctctcccgtggactaatttggatgttaacattaagtattgttctcatctctgtgtgtttctgactttttccctttcatttcatagagagtatatttgattccttagtcattttcagaagagttcactcacactcgtcaggtggggcttgatacctaccataggacaggggacagctgttatatttttggctaaaggatttgaaacatcaatgtatagtttcagagtagaagaaatgggagaaattcctaagacctcaattgcagaggaggattaggtgttcatcagagattattctagattacactcttcatgctctttgacgtctatggggaaagagctctctctcagccaccatcttccctggctctttcatagcttcatcacagtgaagctgtgtcttgatatgacatctgaccaaactgtactgagcatattgcgtgctttacctcatttaattcttatatcaactatatgaataaaacatatactttttctgattagcttttaaatattacatttcatttttttcctttaagaaagagattttacatgaaacaaaaaacccacctctagttagaactatgtataaataaatcctgttttaattaattttatttaaatgttattttatttatagcagcttgttttcatttaagtgttaaaactataaagccgctctgttcagaaatcaaatatcctattcaagtcatcttaatattttaaaaatagtatgtctcttttgtaatgaggggtcttaagaaaaccttctgaactgtcatgtccacttttgatataatttactttgtttacttcacacctatagcttggttttggcaagctaatgatgtgcaataatttatctcataattttcaaaatataaggaaaatttatggcagaaacaggacccttagactaaatatattgtaagctgaagatcctcttgcttgcctacatttaacaggaggggatgtggacatctattacatggacctaggttcctgttgtctgataaatatgtgtaaaatcttgtaactaattatggaaatatattacacattctctgtaattgaaattaaatacttggtaattacaaattagattttattgcctttttaataagaaagaataagacagaatgtttaagaataaagaacagtaaacattcactattcatgtcttaagcttaatgctaatgggcattgatttagcatcaaagattttaatttgatgaaagcttatgccaaattgatgaaaatacatatattttaatgagagcctcttttagttcctggtaatggcctgtagtcaggcagcctgctgtcccactcccaggagcctctgctctgcctcctggctgtctggagagtgcctgagcactgcaggtccttttctgctgcagctgcaacttcagctgctgaaggggcatgcctgtgagctccttgtggcttcagatgggttttcatatacagcatcctttcctcatttttatcactacctccatgttacaaaacagaggacggacacagtgaaagatacaaacaggactgttcaactctgtacctgtgaagtttggttggggcaatacatccctttcatttatagttgcactatggagagggcagatagagagaagcttattggttaggagagggcctccaggagagtccagaaattcacagttgcaaaggaattgttggtaatccatgtctgaacaatatatacactttattttatcagctagttattatgaaaatttttattttactgtcttttagtagccaagttgccattcattgatctagccctaatttcaggctctaatcccattgtgttttatgcacaaagagtttccaggagcatcaacgtgtacccttgtgtttcctgttatttggcatggtggctggagagaccccaggtcaatgactataagctaaaaaggcttcaagaagagagtgagttccaaggtgcatgttcaaataagtctcattctgatggcttttcgccaatactgactcatagaaaaccactggaaaattggagacctggattgtttaaaacctagtaaatcagaacttgtattcatgtaacttagtcaccaactcaatcgttgtacacaaatgtcaaaagcctgagtcattgtgaacctcttctcggctgtatttattagccatttgagactcctctgatttccctttctaaatattttcccactttagtgtccattttccatccctacacactacatgttaatgcagacttgatcactttttattgcaaacaatctttcctgtcttctaggtgacattttgcttcagagcctcccatcactcagtagctgtctgccttaaaggtccagcgtgtcttatgcctttcacaattctccatacttgtttcttggtccatgtactaccaaactgtttatagttccctgaacacatcattctgcttatgcttggtgcagttagctgaatcctttgttggaaattttctttaattgtagctgtgactgacttcttttcctgtaaggcttgcacccctcattgcttcggtaagatgtttcctgtggttctgcttggtcaagggagtcaaatggatgtggcagggcatataccaccattgcccatctccacagttttctcattctacatttactttagctgtggtaacagccaagtgtgtacagacctaatagcatcatgccacagccacaccttacctttccccttctgcatctcagtctgctgctatggttaagttgtctccatgcatctagaagtgttttagagtcagatctcatagagaacccaagatcagctggtgatgggtgccagtgtggactctcctttatagtgtcttacaaagaaaattctaggctacaaggctctgtggggggggtcctttaagccacacttagccacaaaattactaatctccttatgattcatggttatagatttcctgtctctccttccctccatgtttactctcctgtttattgggaccacctccctaaagaaactgtccccacacagcccctttctccagtttgaatttgtttagtcccaaactaagacagaagatacaagggcatgggtttattcaaagaagccactttgtggattttcagaatttcatatatgttctttctaaaacagaactcctggagcatatatttagagagtgatttagtcaacaaaaactttaaagacttgaagttcttgtcatataggcctttcacgtgtttggctagaataagaaaaaaatcatcccgagtgaggtaactcagaccaagaaagacaaacatggtatatagtcactcataagttactattagctataaagtaaaggataatccacccagataggctgagcaacaaggagggcccaaggggaaacagggtacatggaaatcctggggagggggaaatagaagagatctctcctggacatactgggagctggtggggatgggaacatgagggattgggttgggggatgggaacagggggagtgtaatgaaagagacaccctgatgggagtgcattttaggatcaggtagaaacctggtgtcagggaaacacccatgaatttacaaggatgatcctataagactcctatcaacagtggatatgtagccagaactgaccatttcctgtgatcagattggtaactaccccagttgtcctcagagaatcttcatccagtggctgatgaaaacagatgcagagatccacagccagtcactgggccaaacctggggactcttgctgtaaagagggaggaaggattgtataagccaggggaggtcaagggcatcacaaggaaacccacagaatcagctaagctgggctcataggatctcacagactctggaccaacagctaagaagcctgtatgggaccagcctaggctctctacatatgtgtgacaattatgtagcttgatatacttgtgggactcctactggtgggagcagggcctgtccttagtgctttgacttgattccaggaacctattcctcacattgggttgccttacccagccttaatgcaaggggaagaacttaatcctacctcaacttgatatgccttgctttgtcgacacccatgggaggcctaccctttttgaacagaaacagacgaggtgtgtattggcatggggagagggagtgggagggaaaaaaggaggggatattgtggttaggatataaaataaatgaataaatttaattagtaaaataactttaaagcgtcaaaaatatctttcacttgcagggaaagtaaatcaaaagtagaacttattaaaggcaaaagagaaagatgggagggaagccagagcaccatgaaggtcccctgagttctcagaagaggaggatgaggaaagggggaagaagcatagaaggagggaaagagaaggaagcagggaaagatgtaggagaaagggagagagaaacaatcaaatgcattattgtactttaaaagatggttgatggtggatgataaaagaagtttacaatagtttcttatggagcagggtgtattttttttcctttttttaaaaatttatttattagttctagttaggaaacaagcttgtttcacatgtaagtcccttctccctctccctcccctcaccccgatccttcctccccgacccccagcctacccgtcaccccatccacccaccactccccaggcagggtagggccctcaatgggggctctgcaaagtccaccaaatcttcctgtgctggtcctgggcccttccccatgtgtccagggccagagtgtaacccttcacatgggatgggctctcaaagtcccttcttgcaccagggaaaaatactaatccaccaccagaggctccctggagtgcagaggcctccttattgacatccatgttcaggggtctggatcagtcttgtactggcctccccgatagcatctggggtcgatgtactctcccttgtccaggccaactgttcatgtgggtttctccaacctggtacagaccccttcgctcttaattcctccctctcttcaactaaattccagatttcagctcagtgtatatatgtggatgtctgtctctgcttccatcagccactggatgagggctctaggatggcataaagagaagtcatcaatctcattttaggggaagggcttttaggttatcctctccaccattgcctggattgtcagatcgtgtcatccttgtaggtctctggagatctccctggttccagatctcttctcggacctatggtggctccctctgatatggtatctctcatccagagcagtgtgtatttaagaaaagattttaatacagagttgaacactagcattaagggaaagagagaggcacttaggaaaataacagtatacaccaaggtgtaggtgtgggcttctccagagagtctcctgatataatagttttatctgaaaatgtcaaatttgaattatgcataggtttcaaaatttttcttttatgaggaatgtgagcaaagctgaagatcattgctcaacactgaaggcttttaactgtggcctggctcatgtttggaagatcaggctttctggagtgcaagatggttaaggaacaaacccataactggtcatagtgttgagaataagtgattgtccagtgccagcccctaaatgagaaaggcccaggcaacattgtagaagagagagctgaaagaatataagagccagagggctgaagagacagcttagtgggtaagagtgcttgagctctttcagagtgaacagggtttggttccaaggacccacattgagtaattcactgctgtcaataactccagctctgggagacctgatacttattctggattacccatgtatccctatacaggtgacatacatgcatatagacataagtaaacaataaaataaacttaaaaaatgcaatagccggagtgtgggaaagagttccatgaaatcctgttttctggatgtgacatgatgagtgcctccatgagctcatagcagctttagataactgcatgagactgggccctttatcattccatatggatgagtccctaaacctcccagggagctgttgctggttaatggttgctgagaaggcagatgtcatttttcttcagtggtggaaccactggtaaattgtctgtgctccactaaataatcccctacccgctccctagttaaacttggtgggtcaaaaaaggacatggaggtatgaaagtagctagttgggaaggaggtggttttagtaggagtgagaagcattatgagaggataggattgtatttatgtatgaaattgccaacaaattatgttgaattgaaaacgaaattaaataaataggagggagaaatggacagagggaggtgctgttaactgtggcagtatgaaacaagttggaggagtgcgtgctaagcaatataagccaggcacagagagacgaacagagactattcttactcagtttgaaagttgaaggtgttgctctcatggaaaacagtagaacagtggtcagtagatattgggaaagtttgggctgggagagatagtgaggttagataatgggtaaaggattgctgtttgctcagagggattggttatagcattcttgtagcatgatggcatataaccaggaagctgaggtatcacgacacgcaaagatgatgtttgaggtgggaaagggaattgtcctattattatcactacacattggatcatgtttagaattgtcgcgctatgccctaccagtgtgtgcagacatgttattggttaccaagtcaaactgttgaatggttttcaagtgagtataatggatgagaggaggaagacccgttgctccagactcttccctcttcttggtatcccactgtgcacacacacaatcagacatgtggttagatggactctgatgtccacaggcatcagacaggagttacctgagtcagccatgtcagatagaaaatggtctgcatttgagagaaccagccccttccaggggcagcagcacagcccccattactcctttcttacctacaacctgttagaaaatgggaccagtgatgccaaatgtgctgatgtgccaagaaaagacagaaacacacttttatttttaaatttcgaaattagctgattgtttaaagcttggcctaaggcattatctattctctaccctagattttattttttaacatgccgctgcaggccacatggaatataagtcaaatgacatcaatggacctgagttttacactcattggcaaccttagaggagagtattggtctccaacttctatgatctctggcacagggacaaaatagcacctttttcttgattgtacttgaactggggacatatgggaggtgttaaatgctttcaaaaatggcccttttaaagcttctgtggagatttatcaagaaaaagcacttaaagctggccaataatatccctcgatagcttgcttaagttattttttctcaagtttatataaattttcttggctctttgttcttgatgagcaagagaatacattctttattattctaagggaagctaagagatttttattagataaaaaatctgaacctttctcaaattttaaggaagttaacaaaataccatgttttgtttatttctttgaacagtccattcaggaatatgaaatgattcttggtatttaattttgcttgaatacacactacactacttagagatgaaaagttccaaaggaaattagaattttgatattggaaatggaacaaaaaatgtgatgcaggtgtttaagatacaaaggtctaccaggaaaattggtcatcaccaaaaagtaataaatgttttgactgtttattgtctgtaatggtgatagtttgcaaaagttctcagttatctaacaagtattgttcatgtggacatagaaaccaacttatacccagtcctacatactgtccaccctcatgtgtgtcacagtagttgtgcgtcccaagtcctctcttaccacatgtctgtgctggtcttacaagataccttggcatacctctccttgtcctttgtctgatgttcctgaattttgaggataactaatatctattttgcatttattatattgagaaccttattgcccttcttgctgtggaacaactgtcacagccctacaagaagcaggtattaacttcattcttaatttttccaaagataggaccagaggtcatatatagccttgtgaacaatcagtacagaaggaccaggaaggaaatggagacaggtctcacctgtccttctgtagctactccgcagggctgtgcctgtacaaacattttctgtttggcatttagaacaaaaatgcagagggctttgatttctaaaactttggcacagcttgtatgaaacaatatggcttagttcttgattttcatgtcactttcaagcttttaaatatgattttaatatcaaagagagtatatttaatctcactcaagtgaattataatgaacactaattcacaaactaaaaataatctactgcatgaatgagtaggtgtctgtggtgtacctttggaaaaatatttgaaagacaacagtataggagcaaacaactcatagtacatcattaaaacattaacttgaactcatctaacttatttttccaaatcattaccatcatagctcttaataaaatttttttcctgggtcatgcttaacataaagctccctatgacttttatcttccaatctctcatttagaatctaatttacaatgtgcttgtgagaaaacaagaactcaaacctaaaatgtcttaaatacccaaattgcacaaattttaaaaattaatcagttggttcctaatcttcttttatcataagtctaactttcattgttgttatttccaaaatgtagaggttaaaccattatttgtacttcaaaggcattaggaaccaggagttaagggcttaatatcccagatagaaatctttgcaattgtcacaccttttgtagttatgaaaatgtgcaagataggcagaagagtcactagatttcaaattatctgtttttgttcatacctgagctataacgtcaatgaactctgcttctattagcttccttgtttgtacaaactggggtgggctcgctaatgatttcttgtagcttaggtatcttttgattcatggaataatggagtagtcattgtggcattcagacatcagcctagaaaatgacttagaagggtgccaagcacactgtgtcactttgaactatactagacagcaatactgtgcatatacagtggggcagtggagtaaaacagcatatccatttttggtgtttttcttctactatgttcttttagaaatacttgtttttattttatgtgtataatatgatgtttggctgtataaatgtggtgccctcagaggtgccctcagaggccagacttgccatattcccgggaatcagaattactggatgttgtgggcttacatgggggtgctgggaaccaaaactgggtcttctgcaagagcaacaagtgtacttgactactgagccttctctagccccctgataccatattcctaatggatatgaggctatagacttcctaaaaagctatttctaatggagagaaactcaaagctattcctctaaaatcaggaacaagacaaggctgtccactctctccatatctcttcaatattgtcattgaagttctagctagagcaataagacagcaaaaagagatcaaggggatacaaattggaaaagaagaagtcaagctttcactgtttgcagatgatatggtagtctgcataagtgaccagaaaaactctaccaggaaactcaacagctgataaacaccttcagcaaagtggcaggatacaagattaactcaaaaaaatcagtagccctactatacatggatgataaatgtgctgagaaagaaatcagagaaacatcaccctgtacaattgccacaaacaacataaaacaccttggggtaacactaaccaaaaaagtgaaagacctgtatcataagaattttgagtctaaagaaagaaattaaagaagataccagaaaatagaaggatctcccatgtttttcgatatgtagtatcaacatagtaaaaatggcaatcctgccaaaagcaatctacagattcaacgcaatctccatcagaatcccagtacaattcttcccagaccttgaaaaaacaattctcaactttatatggaaaaacaaaagacccaggatagcaaaaacaaccctgtacaataaaagaactttcagaggcatcaccatccctgatgtcaagctctattatagagctataggcctgaaaacagcttggtattggcacaaaatagacaggtagaccaatggaattgagttgaaaaccctgatattaacccacacacttatgaacacctgatttttgacaaagaagctaaagctatacgaaggaataaagaaagcatcttcaacaaatggtggtggcataaccgtatgctggcatgtagaagactgcagatagatccatgtctatcgccatgcacaaaacttaagttcaaatggatcaaagacctcaacgtaaattcagccacactgaactcattagaagagaaagtaggagatacccttgcactaattggtacaggagactgcttcctggacattacaccagaagcacagacactgagatcaacaattaataaatgggacctcctgaaactgagaagcttctgtaaggcaaaggacacagtcaacaagacaaaacaacagcccccagattgggaaaagatcttcaccaaccccacatttgacagagggctgattgtcgcgtccacccttgaccagcaagaatgaagcaacaccgaggaatcttcttctcacagtttcttttggaaccttgatttacaggaagtggccccgaacccaggaaggcggggcttgatatatcctacaactaccaatcacctaaccccaagtggcgcgccagaataggttgtctccaagcagaattaagaggatacgtggcctttatcaaattaggagttgtttaccacagagagcactcgctgtcaggctggtggaaggcagaaactggtgccatcttttaggcacggtactctggagctcccaacagctgatccccaaaatttacaaagaactcaaaaagctagtctccaaaacaccaaacaatccaattaaaaagtggggtacaggggctggggagatggctcagaggttaagaatactaactagtcttccagaggtcctgagttcaattcccagcaaccacatggtggctcacagccatctataatgagatatggtgccttcttgtgttgtgcatgcatacatggaggcttaatgttgtaaacataataaataaaaattaataaatctttaaaaaaagtggtgtacagagctaaatagacaacctcaatagaggaacataaaatggctgaaagacacataagaaagtgctcaaaatccttagccatcagggaaatgcaaatcaaaacaactctgagataccatcttaaccctgtcaaaatggctaaaatcaataacaccaatgacagtttattctgaagaggatgtggagaaaggggaacactcctctactgctggtgggagtgccaactcgtaaagccactttggaaatcagtatggcgattcctcaggaaaatgggaatcagtctaccacaagatccagcaattccactcttaggcatatacccaaaagatgcacattcatacatctgttcaactatgttcatagcagcattgtttgtaatagccagaacctggaagcaacctagatgtccctcaactgaagaacggatagagaaaatgtggtacatttagacaacggaggaaaaaaaaacaacaacaatggaatcttgaaattctcaggcaaatggatggaactagaagaaaccattctgaatgaggtaacccagtcataaaaagacaaacatggtatgtactcactcatatgtggattttagacatagagtaaaggattaccagagtacaatccacactgccagagaagctaataaacaaggaggactctaagagagacatacatggtcccctggagaaggggaaagggataagatctcctgagcaaattgggagcatgagggagggggagggaactaggagaatgagaaggagagaagaggaggggtgaggaggacatgatgggacagggaagttgagttgggggaagaacagaagagagcaagataagagatactatattagagggagacattataggtttaaagagaaatcaggcactagggaaatgtctgtagagctacaaagatgacaccgaataacaatctaagcaatagaagagaggctaccttaaatgccctcccttgataatgagattgatgactgacttatatgccatcctatagccttcatccagcagctggtggaagtagaagcaatcacccacagctaaaccttgaactgaccagttgcagaggaggattgatgagcaaaggggtcaataccaggcaggtgaaacccacagaaacagctgatctgaacaagggagagctcatggaccccaggttgatagctgggataccagtatgggactgatccagaccccctgaatgtgggtgtcagtaagaagacctcagaaatctatgggtcctcttgtagtgtatcagtacttatccctagcataggaatggactttgggaacccattccacatggagggatactccctgagcctagacacaagggggtgggcatgggctctatcccagaggatatgacagactctgaagaccccctatggaaggcctcaccctccctggggaacagaaagagtatgggaaaagtagggtgttagttgagggggcaggggaggagaggagggagagggacctgtgattgacatgtaaaataatctttctaattaaaataaaacaattaaaaataaataaaaaagaaattggaaactgcaggttgttagctgaacttcactgagcaattggggaaatgcaagagtacacagcaagcaacactactcacatgaccagatagtaccaggtgctgaaaaaaaaagctatttctaaacagatttatgtatttgcatgcatttcagttttattagatatttaaataacaccataattatatttctgttaactatacttatgtctaatttagcatctggaataacataccacttcccacagtgtctgcaatatttggtatagcaccatctcagaattctggttagcaaaactatcataaatgttctgctaattctaaaaaggcagaatactgataaccaaactatactctctaaactctctctctctctttccccccccctctctctctctctctctacacacacacacacacacacacacacacacacacacacacacagagtgcacctttggcaagcgaggaaatgaggaaatggaggggaaaacaagatttaagttataatctcaaaacctcatttattcattttcatagtaaatcttttcttgccagacttgagtcccctgtccatgtggacttatggattactggtaagagtcctcttaccagtcctcttaccagtattcaacaagatattagaagcatgatgatttttttaaatataaaaagacgggctggagatatggctcataggttaagagcactggctgttctttcagaggtcctgagctcaattcccaacaaccacatggtagctcacaaccatctgtaatgagacctggtgccctgttctggccagcaggcatatatgcgatgcagaatactgtatttaaaaatagaaaaagacattcttttcaaatttttaaaaatattattattgtgcatatatttgtgtggcgggggtaatgcactcatgtgacagagtacatgtggaggtctgaggatagctttgtggagtgagttctctccttccacctttcatgctggttctggggattgaacttgtggcacaagtacctttacccactgagccatctcaccagccccaaggagtttatgaggacagatgaaggatgttgtggatgtggctgcaagtagagttaatacatctaaactgagagaatgaatcactagagtaaagttgggaaagctcccacgatgaagggacctttaacagaaatctgaaaaataggcagatgacaagccaaccaaagatttgaggaaactgttttaggcagatgggatagattatttgaagttcttaaagcatgaaagagtcttttcggagagactaaaagcagactggtacagttgtcatacaagtccaaaacgggaagtagaaaatggagcatgctgtagactagaccttgaatggactggaaagtctcttgtgaggagcgtgcccttatttaaggacacccagatttcagttaagggcttttaactgaaatggaatgggggaagaaagcaaagaacgcaaccaagattgtataatgcttgactttgaaatcatataagattcataaggatttgcaaaaatagtatggagggtgctatgtgccttcaccctatttcttccaatgatagaatctaatgcaattatagtatagttttgaaacaatacatttatatgttattagctaagatgtagacttatttggattttacagttttgacctagataattgctttatttatatttaaaagtgcaacacaatgtatagaaaggtctggaactttggctggatatatgattcagaatattatttgaagattaagaagcaaagtccagttgatagatgagtgtttgtttacctaggtagctggaggggcaagaatgatggctcagctggtaaagtgtttaccatgtaagcacattggggttcccaacattcatgtagaaaggtgggcatgatgctgcatgcctgtaactctaggtttgggaagtggagtcagaaggatcctcagagcacactagctatccactcttgctgaattggtgagctccaggtttgaggagagactctgtccaaaaatataaagtggagagtgttacgataaatctttccaccaaaagctgcctgagccccactgccacgtgtgagctttacgacagccgcctgcccgagttaggcccaaatgaatacacagagagacttgtattagttacaatgctccttggccaatgactaggattctcatctgttagttcagtctcaattatcatacatctatatattttataagacttatcttatcggatgccttattggcgtccctcctagctggtggatcacattgtgccgcttaagcaggagccgaggggaaaagaggcccttcctgtttctctttcacttaaatatgagtctccttgctatgtcacttcctgcctggatcagcacttctttactacatttcccagaatcctctttgactcctacttccatctaatttgctgtctcattggccaaacagtattttattcaataatcaataagataaacatacacagtagtacattccccatcatctcctcttttctgtctaaataaaagaaggataacttatcttttataataactgaagaaaactataaccataactatcagtctttaactctatcaaagaccacagaaggataataaataaattctagaattgacagagactttttgatacctggacagttacccaaagttcctctgtaatgttggggcatccaatttcagcccataggccacagtgtgtctgggacacttctccattttaacaggaactcttcagtactgtcttgttttgtaagtttagcagtcattttcttgtgggtcctgcatgtttagtttattcagcaacaaacagtccaggcaagagcagtttcttgcccaaatggctaatcttgtcatgttgaaagcaaactccataatgagtttctttgatgcccatcctcctttctgacataattggtgtgccaggaacagttgtgtctcactgccataataaaccctaaaccatttaaatgccatatttctgtaggtctttgaaaggtttgaagaataccttaccatctgaaatacatcttgtaaatctagaaaacctaactaacctaattataagtcctgactattataggtaaaagatctgtataaacacaatacctaaacaagaggagacatatacatatcacaaaattgaccttaaagttgtatcaataaatgaaatctataccaatgcaaaatattcattcctatatctatcctattccccttatttttaaacgaaatgtaaacctttagaggtttttttttttttttatctggatctgtctttatcatctcgggagtgctgagtccaatgcccaagagcgccaagatggtgcgagcataaggaagctgctccaatgcctctccatggcccgacagggcaggctgtggcggcaggtttttctctttctctggaaatcttggggcatggggttatcccacttctgacaccagatatagtggaaaattaccaatacggagtcaggtagaactataagggtatttaatagggaaaagccttacttacagagtgacctagccagccgccgtggcagcggtctatacggcaagaagcaaagtgaaaccgaaagcgcaaacgcagccacactacatcactctgatctccaaatacaagcaaacacatatgttcgtgctctctctctctctctctctctctctctctctctctctctctctctttctctctctctctcatacacacacacgtacacacacacatgtgcacacacatatacatcatacacacacaaataaaaactagataactagaaatatttagaggtagaaatgccccatatgtcttagtgattagatactcatgtgggaaaagaaataagttaaagggggatctatcagttgctgtattcagcagcttggtcagccattcgtgaagcttgtaattgggagtgagacctagaagagaagtaggtgtatagaaatccagacataggctgggcgttggtggcacacacccttaatcccaggattcaggaggcagaggcagacagatctctgtgagttcgaggccagcctggtctccagagcgagtgccaggataggctccaaagctacatagagaaaccttgtcttgaaaaaaccaaaaaaagagaaaatccagacatacatgccttgtgaccacagtgagctttagacacctgtgtaggtgatgtccttactgcctgaatctctagaatgatggaagtgggcagagggcataaaggtttaggcaacataaatttatagtgaacagtttttttgtaagattgtctaaggagaatttgttaaataaaaaaagaataaaatgtgttgagttgagtgccaatgattatgaagattaaacagccacattggaagtaacagagctagaatctgtgtggtgagagctagggagaaacagtggtgaggtagaaacacagagggaacaatagatgaggagataaataggagagagatgggaattgagcaaatatgtgccttattagttaagaaaacagtgtttgggagaacaaatatcctcattatttctgtgtcttttctgtgactccatgtaaagtcatgccccaaaggttttctgtgcttctctgagtctgctgtgcttttgttcttaaagtttagcatttatattattgtaaatgcaattcatgacaaagcgtgatgttttccataacattgctttatacctcgcagaatgtgactttggattgggaacacttgaatattttactggttagatttttgtcaacttagctcaagctgaagtcttctgggaagaacaaacaccaactgaggtattggcctatagacaagtctgtgggtacattttcttgatggatgatggatgtggaagggcccattccaccgtgggctctgggaatgtggccccgagttatataagaaagcaatctgagtgagtctgaggagcaagcctgagtaagcgccagtcctctatgtgtatcaatggtgatgacagttgtctaggagatttgctgagtttgttccctggcatgaacgaaaaattgaatgaccagaaaagacagaaaactaagccacaggggggaaaaaatgaaagaaaaatttagtacattcagaatgggagaactctaagacaagttttatttgaccaccaaattgttagccagggaggctccagcctttgcacaatacacgctcttggcattcctgcttgttgtccattacaagtcgatgatacaaccctactattgatacacaatgaggcaagatacagaagaatcaaggctcagctggaaacttcctcctcctgactaccttctgaagtgttggaagatgctattcaggcttctgtgggagaaaagacatctactaaattgggaagtcatcagtgggattgcaggttcaagcttattggggcagtagtgtggtttatggtagttttgctatgatgagctgtatgacaaatttggaatgacaaattcaaatgtcccccttaagaccagttggtattaaaacatgaggaggagaacactgcagtgtaagagatggctaaaaacttactgagggctttgaaggaatgttgcaagaaatggttgaccactgctgatgtaaaaagaaatacattgggattctcaacatggcaagggatgagcatagccgaaactcactacagggactttccacacaatgttggtggttcccacagccaattaaggaagctggtggcttaatgggagaggataagatggaccagatttagaataatttaaaactgggtgtgcagctccacaataataatctataattacaaatgagtctgaattgaacatgcagaatcaaatagtaaagaaggtaatcattttacaaaattatggatctttaattttaaaaattgtgcagtatatttccttccagatcctctctactcaagcaacttcatgttctctacctcctacatctctctcaaaagaaaaagacacaaaatttaaattataacaacaaaaagtatacaaataatatgacaaaacaaaaagcacacacacacacacacacacacacacacacacacacacacacacacacacacacacacaaaatggagtccatttttgttggccagtatgatcgtggctgatataacagtgacactccaccagaaacactgatttttcctttttcagaaagtatcattgcaactagctccttggtgaggagtgtgaccttgtatccatttcccttctaatgctgagatctgtctggtttgaatgtatgcaggtcttgtgcctgctgttacagtctctgtgggttcataaatgtataaccctgtagtgattggaagatactctttccatgaagtcatctcatctatcacctctggctcttacaatctttctccctcttctgcacagatccctgagccttgagagaaagagtttaataaaggcatcccagttagagctgagtgcttcaaagtttttcactctattccagttgtggttatttgtattaatagctgtatactgcaagaagaagcttctctgatgagggttgagtaatatagtgatctatgggtatagtgctatcatgttaggagttgttttattgatgtagtcctttagtagaataaacgtagtagttttgcatctaaggaccaggcctatctagtctcaggttctcagtccctctagtagtgtcaagtattggttccatctcatggagtgggtcttaagttcagtaagaaagtggttgattgctctgataacattagtgccactattgcaccagtctatcttgtagagaggtctctattgtaggttgcaggatttaactgggtagtagtgaagtaaaatctaatctcttttatctggtggcatgtagcgtccccctagaagcatgaatacaagtcagtaggggtgaaactcctagttggccaccagctcaaattcttcaatacagctttattgttaggttgtggaaggtaaccaatagccttgtcagtatcttgtaatgtttggggggcattcctgagacccctttagtcaatgtctcatcaagatgaaacccttttctgccattgggggttttactttctgatataaaatgtctagttgaggcattgtagctcccactctatggtgactcacatgcgcaagcttctccagtagtaggtctccaaatggcttttcaagaggcctttagtattagctgtctctcctcgtattcccttctttaccctacactcccccctcctatttggtcctcctcttctcgcttctcctttgtctgtttatagcaccgtattctatttccccttttgtggctgatctacatctcccccaacccctgctttggtccctaactagctacctaaactttatatgcttatttgtattgaagcacacatggaaaacttaaatgttaacatccatatgtatgagaagacatacagcctttgtctttttgggggtctcgattattaaaattgcttacccctttcatttatacattttctaatatcatgttttcaaaagaggtagcgaaggagttgacttttaaatggctgatatcccccaggaacataagggatatgtaagtgtgacgataacttgaggagtccaaagtaaaagaaggtattcattttattatgtgcaaaagcttggctgtactgacatttagaactccaaaatattatattcggcatagaactcttaatgatcctcatggcacagtcattcctctgaatggtgtcatttacaacacaattctcagcttaggaaataaatggaggggtgggtaatgaggcttgtacggtggtggctgagtcaaagtatgattaatattgagtcactctgatgttctctattgcctgcctttcctccctgatgcgtttttttcctttatctgcagtaagttgtcatgagaatcaaatctggtaaaccagtttcttacatgggttattctgtcagactgctaacaagtgtatttgctcaacattaagggagacttctcactgccaagatggaagtctcattttgatttaattctggttgattgccattttacttggataaatgaggaggaaaccaggttatttagacacaatcattactgcaatagatgttacaagttttcctatatatttatttaggggtgtgtgtgtgtgtgtgtgtgtgtgtgtgtgtgtgtgtgtgtgtggttgtgtgtgttcatgtgcgtacaatcctcctctttataaaacatgagacagtaggtcttactgtctttctttatgcataattctgtttccaacaaatttcagttactctgaaacttgtgtgcttaaagaaatctaaggaataaacccacagggataagcctggggaaagcagtgttaattattgctaggctaaaggacagggctcatttgtaatgaatgattgatgtcagagctagccagaccaatgatataaagttgttcatattaaacattatggctttgggggctggagagatgactcagtggttaaaagcctgtattgtgcttgtggaggatctgacttgggatctgataacccatgtcagatggcttacaaccacctataactccttcttcagggatatttgatacctctgacctctgagacatactgcactcacatagtattcccccctacataattaaaaatgttaaaataaatctttaaaactgtgacttttgtggggatcaaaaggaacttcagccattgtatctctttgaaatgtgtcattccagatgtatactgccttaggcctgtttccagatctttgctatttctaatcttaagtagattagaagtctcccttctttccctcagctccgcttgggggctaatttgatctctgggaacctgttacttcttcaagcctaagccttcttgagaaacaacacatggatttactataactggatatttaggatgcttctctatctgtcatcctcacatccattgtgccagtcctatagtgtttacttgcaaaatgaagcactggagttgttcacatttccacacatctcttctaacacccttctaatgcaggcccccagctttgtaactgtgggtcatctccccacataggactttgtaactcaaggtacaagtcatgaaaacttacggacagaaaaaggtcagtgaatgtacaaggatcaaaatttaattcaaaatcacgcgcggaatgaatctgagatgtttctggcagcactcgggctgttgctgcatttgacttgactgaagccttggttttgagcgcatagatgtatacgctgcgccacaaagtcccttgtgctatgcaaatcctgctgaggttgttggaaatgttctgcatttgagaaaattaaagttatgaattacagaatttatactttttcatgtactattttatctgctctcatagcaacataatgatctaattatagaaaacaagacttttagcattttcttgctagctgttgccagcatgtagcccatcagtatttctttggactatatattgtgctagtttaagttttgatagcttctgacaaaccagaatcacttgggtagaagaaaaaaaaaaaagaagcctcaactgatgaattgcctccatcagattggcctgtgggcatttctgggggacttttcttcattaatgatcagtgtgggagtgtgggaaagtccagccaactctgtcttccctgggtcggtgtgcctgggttgtacaagaaggctgaaaaggccacagcaagaaatcataagcagcattcttccatggtctctgcttcagttcacacctccagacctgttccgcttgagttctgccctgactcccctcagtgatggcccattcctccaagccaaataagcgccttcctctccaagatgattctggtcagtgtgttatcacaaccatggagaaacaaaattggaacatctattgttagaatgttcaatgctaaaaatcagtgcttgagcttccaacttgagtatcacacaaactgttcaatgagttttggcttaaggtgagaacattattttcagtagtttccaaaatgaccctaagcatccttctgccatcctgtactgtggatttatatgaaatggtattcttctcactgataataataaaatcaaaagattgatgaactctgaaaaaatatctgacaattctaaatctcaaaatgtcaaatactcagcaaagatttattcatgttaaaataagcaaacactgtgtctcattaatatgctaatttgcttttttatttttaataaatgtttgagttcttttaaaataaatttctatgtggtttatcagtaaatgcttgttttatatacctaggatatatctatctatttgcataatgatcatgtttatccatatacctagggttatgtaaagatttcctggctaaagaggagtactggggaaaagttcaagacctaggtcaccattgtatcttgtttgaaatagtgcagtgtcctttctgagccttacttcccttctcctctcacatggcattttcctagtttattaactgcaatccacgtgatctcttaagacataattcatagcttatcacttactatcctcatttcattctcctcatagattattcacattccatcaaaagtctagttctttcccaagagcttgcaggtccctgtctaaaccagactctgctcaagtctgcaaattcatctcaagttgccgctgctcctgcccaagagcttctagctcaaacttggcgactgttttgaaaccctggtatttattacccccaaatgatcagttccttctggtttgtgtacattcctttaagtctttcatggggtggatcatcttatctttaaacttctgcctacatgtttcattttcatgctggtctttgtcatgccaccttctaatccttggcattatgcacctttattttttaaaattccagacagtttctatacatgtctctagtgttcatgctgtgttatcttctttttctgctatcatacgagtcctaagaatacagaggtctccttccacttattactgtacatgtggtgcctagtactgtgttttctgattgaaccggtggatgaagagaaggtggttttgactgagcacatgactaaaaggtttacatacctgaggcagcattttctaaaaaagcattgtgggatgaaaatcaaaacttgtatctgctatttttttgactactaagactaattcattcctccctccctccctccctccctccctccctcctttctttctttctttctttctttctttctttctttctttcttttatttttcgagacaggatttctctgtattgctttggagcctgtcctggaacttgctctgtagaccagggtggccttaaactcacagaaatccacctgcctctgcctcgagagtgctgggattaaaggcatgcaccaccactgcccagcgcctaatctgtttctttaaagagtttttatgtgtggaggatggaggttgaaggctaaagtgaaataatataagtgctaaaactctgacagattatccaactccaagagagcagtcctaaacacatgcacccaacagagacactaagtggacttaggttatgtgtgtgtaactattacagttatagaaggggtcatgaatttgaggggaaatgataggagacataagaggagttgatgggggaggagtggaaattatgtaagtaaagcatctgcattaagaattttcaaaaacattataaaagctctcaaattgctctttcctacatattagtcccacttagacctggaatatccaccaggggaagtgcaggtatttccacagattccctaccctgctcacatccccttatcctgcctctaatctcatttattccagaaggtgacagcaaagtagaatctgtgacagggctgtgtgcagagtgccacccagtaattcttgtacctttgttttcttttaattggcaggtattagtttgtggtatacaaggtgttgttgcaatacacgaacagactaggaaatggtcacatcagaaccattagcatacacaacccctggaacagttaccatgcttcactgtgagaagatttaaaatccccttttaaatgttttgaaaaatatactctgctgaacctcactatgtaatcatctttcagaattatgagtagagtttatttccaccaaatatatttttattggcagtgaccttacttcagtatttaaatcactttgtgggagattgtggctgcattttaaacccgtcaatcatgactgcctgcatatacctgtagtggctgaattttaggcctagaagtgctgtactgaaaagataataaatattaaatatttgcttctgaaaggaacaaaccttcagaggacagcatgctacatgatatataggtagtgaataaaagttatgaaatcacatttatttatcttcccatttctctgccaccctaaaccctctctgtcttctgcaatgaaaacttaaggcaggtcgttcagattacaatgtctaaatcattacacagagacatatatctaatattataaaatcaacatattagattctactgtaagatatttatgtgcaaagtatttagtgtttattaccatatccagattcctaaaataaagccataggatttaattaaatgagttaaaaatgatgagttttattattactttttacagtttttcttatattcttttcctatagacacagtggaaacttctatttctttggtgcatttttgtggggagaacccaggacctcctatataaactgagctgttcttgtagctccccaggagcttgccttttctgtcaaattcaaacattcattttaattgatggttacacttccatagactttattcctcttccatatctgtatatagagtccatctggagcagaagtacagaatgagaggaaagaaagcgagacaggataggtaagcacactagaatcaaatcagttgacctccattgctaagctcaggagcttttactccctaaaagagggggatctctctgaatgaaccaatgtgaatgcttaaattcactttacttttattttattgtggttttttttgtgtgtgtacatcaaaagtcagcatcaagtgtctgttctgttttgtttctaagacagggtttctctgtgtaatagatctctctattagtcctggaactcgctttgtagaccaggctgacctcaaactcacagagatcctcctgcctctgcctccagggcttaaaggtgtgtgccaccactgctcagcttgttagaatcaggtgtctttacagctctccatcttaattttgagacagggtctctcactgacctagaactcattgattcagctagacaggatgactgagcaagtccttaggctcctcctgtccttgttactccagcgctgccatgataggcatatgccatcaacctggctttttatgtgagtgctggatatctaaactccaatctccatgcttgaaccacaaacactttactgaatgaaccatcctcccaccaccatgttctgtgaaattactcccagggagacatgagcaaatgtgtacttaccccagataggaaaccgacaacagattgaagtatggatactacccaagtccaactacgagaacctgtaggttttattgggaaatgtttaaatatgtaggtgaggggttatttaatggaccagaaatgacccagagacaggtgtgccatcaaaagctcagtccagcattgaagaatgccttttctagatagttcagttggtctgaacctcttccaggcatcttggccagtctgtgtgttttcttgggagctttccttgcctctgtttcttccaggaatctgatggtctgggccattttaggctgcttagcttatcagtgtgtttctcagaagtctttactgtttatatagccttgggagtctggggtctagtacttggtcagttatagagactccctaagtgtttgagttgcttactttctgtgcttaaggagttcctttgattgatggaatgttttcccatcaccattccactttgaatatgctgtgtcttaaagagcttccctccaagatggaggatgtcatctgggaggaaattgctatgtaaggctctctaagccacagaattattgtcaaatggaagcactttcctgcttctactgtatatggtgaatttactgtcctttatctgtaagagtttgaagcttaaaaagttgaagtgtgtaaaagaaaggcatagacagagacacatagaaacaaagtaacagagtgacagagaatatgcatgaaggaatgtaaacatacatgtgaaaaagaaaggtttgtattttaggttgcttgtcaatgatcttgaacatcaactccccagaacttgcacttttggtgcctgtattttcttatatgtcaaacaagcataatagccatatctattctatctcctgctcagcttagggtgttaaagaataaaatgtcctatgtagggctgtttagaaagcatgaaatagtcttttcaaatgaaagagaatattatccaaacacaactgttatggctacagattttgtagcataatatttacttttggatttcataattaggataattatttgaaattggaaaataaaatttagttttagaattagaagttgaagcatttaggcaaactatggtctcagaagccaaacagattaatctttaaatcctgactctgcctgtcactaagtgagcatcattgaacattttgaaaatggctctgaactccaccataatgaactcagagaaccacaatgaagcataaatgaggcaagaattttgcatattacagaacacaaagtagctatttaactcatatcaataatggtccagctactgcaactgtgatgatgactcgggttgtcagtttggggctaagttttcccacttattttcagaaacttaggactcacacagcttttacaactaggactgagaattaaccttttagtcctgttttaaatttttcttcaggacgattcagagtccttcatgtattaaagtctgatacagaatagtatttggagagacaagaaggtctatcaaagtttttgcttcctgagacatgtcaagtagtggaacaggctacttggctttagttgcctgaaattagatgactcaagtgaattaaccaagtcattattttcagccaagggaaaatctacacactggggtgtgaggcaggcaggcagggttggtagaagatcatgttatttttttgtgctattgaatgcaagcacatttaaagagtatggtaatttatcccagagactaattgttttaaaatgattcatttgctggctgattatagaaaccaaggcattgctgtaatttaaatgacaatgtatagtgtggtgaaggtataaggcacttggcactgacatcatgacatccaagtatgttctgaagttgcccaagatagtgactaacttaatgagtgtttgtagtttgattgtgtcaactgccctggaaacaagtggtttctaaaaaactggttatttagctcactgaaggttcaaaattgcaactaggcatataaacttaggccatgtgtcatattttcttttcaatcattgctcaattttgttgtgtgggcatctggacatcagtgatagagttaattcttaatagatggaactacatagttcttaacattctgcagtttgatgagtatggtctaacttatttttaagtaaaacactttacagcacttctaccgaacctaacatgcacttttctgatatcaaagagggagcttagagaacaagagtttgatctgcctcttttggagactgctgtattttaagttagggtcacttttgtgaatgaccagatatgtgtgtccatatctgcacagttgaatgactgaatagttgaatgagaaagttttaatattgatcttttgaagattgatgaacacctacaaagaatgataattttcctgtcattaatataagcctctattatctgtccatagcttgcctgtgatttcaagagctatttatcattattcttagtcagtgacaatagaggggggagctttacttaaaagaaggagaatgtgtacattgttgttgaagtgacatttaagcaaatgaatattttatgggctaaccagctttccttagtatcaattattagttctagaattaattctgaaggctataaattctttctgttccctcatgcatattcttgctataggactggaaaagttctagctgaattggtggatgtgagcatcctgacctaaagtcattgtagacaggttatcaattttgaagaagtatcaaaattggccaatagaatcatccaattaaaatttacctttaaaaactgtcagttggtcatattaattctcagccattttatacctgtagagatgacccaggaagactgtgcacagagcagatacattctcaacaggatcttaattgagtagcagccagagaactatttcaagaacttttttatttattctctgatgggtgattaatcaaatatttcattgaagataggtggggttatcttctgaaatgactcccacaatcaggactgctggaggtcttatgaggactacatctgagtgaaaaggctgtggattgtcaacagggataggacttgggagtttcctacttgcagagaccatattctgggccacagtgaccttgaattgcatggatcacttttcctgatatctgagcccaaatatgaccattgagaactaaagagactgatttgttttatttaaatggttgactatacaagttttgtgtgcagatattagattgttttggctggtttccatgcttggagagatcttaatggctgcaactatttcagtgcctagaagttctttccacactaaagaattagatgcaattcatactctgctggggaaggctgcatgtggcatccttatcattgccttggatgccattgaggaaactctgtcctaaaaacaacagtgaagaattcagacttctggagataattctttttatttttttatttattttacatgccaaccacagtttcccctcctcctcttctcctgttccctcctcccaccttatttctaatcccagcccaattcactcctcagatgaggtaatgcctaccatagggatcaacaaaggctggcatattaagttaaggtaggaccaagatcctccctgctgtatcaaggttgagcaaggatcccaccataggggataggttccaaaaagcccactcatgggccaggggcagatccttgactgactactagttcttaaagccatagagaacactttattttgttcttggcatgtgggaattgcctgggaatcctttattcaggttcctacaggaaatgcctaaaatgtctgttaaaaggagggcctgatttgggataatacttgctgacaagggcagcttggaattctgtcttagttaaggttactattgctgataaaacaccatgaccaatgcaaaatggggaggaaaaggtttatttggcttatgcatggacatcatagttcattactaaaggaagtcaggacagaaactcaagaagggtaggaacatgtaggcaggagatatacagaagccattgagaagtactgcttactggctcaatcctcatgacttattcagcctgctttcttatagaactcaggaccacaagcccagggatggcctcacccacaatggacttgggccctcttccatcaatcactaattaagaaaatgccacacaggcttgcctacagctagagtttatgggggttattttcacagttgaagctccttttgctcctgtgggtgtaacttgtgtctagttgacagaaaacaagccagaacaaactagatcacacagaggcccaaagttttcatcttgatgtggtgcagagataatttgtaatagtttattgacaaagagtgtcatttgacaaagtctgtatgggggtataaattatgtcatagtcttctcttgatccatatttattcatttatttgtatttctgcagcattggatactaaaaacaggatttcatgaatgatagcactctaacactgaacttcacctaaagcccaataaattttctccatgctgacacaggtgcacctgtgaagccttgagtatttttcttcagagacctgagattaaatgatctccacccaaaatgaaatttgggaaatatgtgtccctggaatgctctgggatgccttactaaatgcttgggaaatttgcatgatggtcagagatggtcttcatgttccttgtttcactatttctgtattcataggatagctcaatagcactctatatgagggaaattcctttgataaaataaatttcttgatgataaaaactctggtatttggggaaatacttataaattagcatatatgggattctatatgaaggtgccactagcctttgtaaggtcatggtgagaaagaatagttaagcatgcaagcttcacgaagacaacttttgcatcttgttttaaactctaaaaagaaacaatgcagttttggcctgaaaacatagtttctggcacatgagaatttaaaaataacgcagaacaccagaaatcatgcagccgaagaactccacctcagaaacaggacttttaaaataaaggcatcatgagactcttcatacttttccatctatcaccatcacttcctggagtgaaaattcctgccattagtgctttcaggatgtcaagaatataaaagccaacctcctcctggatgccaatcattgtctgtgatcattaattaaatggaaaacagattagttttattttcttcaaagtagctactgcttatgctttacttttgaaatgattttttttttgcagaaaaatacacatccattttaaacttcagaaacatgcaaactataaatgtaggaaaataaaagaaaaaatataattctgtcacagaaggccacaaagtcaaaattttgttgatttcatcttgatattgtttgaagtcatggttggatactttggtatattcctcttattgctgcttctgtagtcgttgctactaccaaatttattccttagtgtttactgaatgtaattttgtattgtcacaggatttacatagaaacaggtttcatgtttttaaaactcttattcttaaaaatggcatcttacagatgatacaatggaaattcagaaaagcaaggaacattgtagagctggccagactatctgaagacctgacaatgtgtaacttcaatgcttattatttttatgaaaattcattacacctatatttaccctaaaaattcttcatagtgccttttgtcataacatatcacagctttctctatgcctctattactatgaataaatgtattttaatatttttaaatgagtttataatataattacatctcccccaaccctccaatatttatttcttccaaattcattttgaatttcagaagagccatctattttcagagttttacatagaaataaaggtgtaaatatttttaatttaatgtacatctttttaacatttaaacccaaattattgtgactcacagtgtgtgaagatcaggcctggtagacttagcctacctgagaagtcatacagaaatggaggagagggctggtaattcaatcagtagtccctactgtaggctatttctctgagaatgtgagttctcagagtcagtgtgaacaaaggccagcttgtcttcacattttaaaaattcaagtctttcaatacaaaaatccaaatgtgctgcttcacatgtactgccaaggactcagatttcattaaacccagtttctgacttacagtatggtatccccccacttgacaatatatttcttagcattggtttctcattggtttttatactcatagtaagtggtgtggaaagtcttatccttcagtgaataaaattatcacactcttttaagttctgccaaacttcactgataaccactgaatcccaattggaaaatttgtttatatctttcctactgactacctgtatttaattctagttctaaatcgtatggtttttttgaatatcttgttcaacatagttttttatctgtctcattagtctaaatgaagatgctcagagaaataatgttttcctcagaaggaagacattcagatgaaaggttgtcacatttctgccagttgtttgaaggagctaattaggaatctgttccttaaaacactccagctagactatgtcttgagcacccataccagagtggcattaacagtagaagtatggtgtacagaagagagcaaattataaacataaagcctagtagatgattcatgacaaagattgtgaattttcttttataatatatagagtgaaaattatttcttttatgattttgtaaacttaatttgcatctattcttagaccaaattatacattttaatttaatatgcatccattcatttttcccacaatctttgtacattaaaacattgtaaaacaaattgaagctacatgcttgctgtttgtgtgttggtcacttactagatgatagtttgcttaaaggaaaatttcttgttctcttcctgctgtcatggtgccgttttgtcaaacctttcaagaagatccatttttttgtgtgccagaaaactgcatagctccactgagccttgagaatgatgaaaggctggtcatacatgtcagtaactcctccctctcttgccttaggtcaaaggatctcataaaggaggccatccttgacaatgacttcatgaagaacttggagctgtcacagatccaggagattgtggattgtatgtaccccgtggaatatggcaaagacagctgcatcatcaaggaaggagatgtgggatcactggtgtatgtcatggaaggtatggttagtaacctgctcctctatcactcattcctttccaatcttcccagcttctcaaggattgcaatatgttctgtggaacatgcctgtcttgttccttcattgggaaacaaatcgaaagataccaataggtaacatagttgtctgattagatgaagtttgttgtttataatattaatataaggattctatattagttttcacagctatagagagtcaacagtgtgaaaatgatactgtttgctgactgaatgagactgcacacaattgcactgttgagcatgctgataatgaaaggaaatgggaagtcttttaggtcagataatcagcgccttcaactctactcttaacatttaatacaagactaggtttcctgtcattgcttcttctgggtaaatatgttttcagtcacttgcatatatatcacagagacaatgaagactgaatagcatattagccatctaattaaaaagaggggagcaggttttacaaaaccttcagaaactgaggtagaaattgttttgataaataacttatccatttactatgtaaatatgttttatgtctaagtaaattttaataatgattgtttctaacttggaatttacaatggtgtattttcctttgtgggaacaatctgagatgttgtttgaaatagctgacaagaaagtgagtccagaaatgcatgtactaaaagttctatttggtgtggtatgtatggccagtgttcagtccagagcattcatgttgagtgattcatgactcctatagtctctttcaagttttaggtcattaagataaaatgtgtgctgaggcaaatcatattttctctgagtttcaacaacccagtttataaaattggatattctcgtggtagcatctagaggtgtttgaaatggctaatggctttagtaggaaagcttggaaagtttctcatcaagataaaagcccaatacagagtttttgaccgaaaaatattattattattaacattgataatggctgaactttttgcctattttacaagattataaggaagctaaataagataacttacatgaatattgatgtaaagaataaaacataataaaataataatgttttatttgtttctattaggtgcttgaaagtatacttaaatgttatgtgtacctttatgctttaccttttaaatttttatttgtagtcttctagaatatttggtttttacatagcagtatctgtcatctttccttttaacattttcacattttcccacattaaaagcttctgctcaaggccaaaaggtataaatattcagctaaggtttctcttgataaaaccaaaacacagtaagcacatatgtaagtattatgcacatggcagagaattgtaggtataggaatgggtttacaaggtaggtatattgtgagacaatgagtaggcaggataagaaaaatgggaaggaatgaataagagccaagtacagattatgaaactagaggcattcttctagggatgattaagattaggcagcacattaaatgtgtcaatggtgtcacatgatttgattagtcagaggttgtgctaggaggctatctatgtacaacatagccatcatataaagcaagatgcacttttaatttgattgtcttcaaattgtaaccactagcattccactgcagcctgtctagctgaatcaatgagttctaggtcagtgagagaccctgtctcaaaattaagatggagagctgtaaagacacctgattctaacaagctgagcagtggtggcacacacctttaagccctggaggcagaggcaggaggatctctgtgagtttgaggtcagcctggtctacaaagcgagttccaggactaatagagagatctattacacagagaaaccctgtcttagaaacaaaacagaacagacacttgatgctgacttttgatgtacacacacaaaaaaaaccacaataaaataaaagtaaagtgaatttaagcattcacattggttcattcagagagatccccctcttttagggagtaaaagctcctgagcttagcaatggaggtcaactgatttgattctagtgtgcttacctatcctgtctcgctttctttcctctcattctgtacttctgctccagatggactctatatacagatatggaagaggaataaagtctatggaagtgtaaccatcaattaaaatgaatgtttgaatttgacagaaaaggcaagctcctggggagctacaagaacagctcagtttatataggaggtcctgggttctccccacaaaaatgcaccaaagaaatagaagtttccactgtgtctataggaaaagaatataagaaaaactgtaaaaagtaataataaaactcatcatttttaactcatttaattaaatcctatggctttattttaggaatctggatatggtaataaacactaaatactttgcacataaatatcttacagtagaatctaatatgttgattttataatattagatatatgtctctgtgtaatgatttagacattgtaatctgaacgacctgccttaagttttcattgcagaagacagagagggtttagggtggcagagaaatgggaagataaataaatgtgatttcataacttttattcactacctatatatcatgtagcatgctgtcctctgaaggtttgttcctttcagaagcaaatatttaatatttattatcttttcagtacagcacttctaggcctaaaattcagccactacaggtatatgcaggcagtcagaccatctatctattatgcctttgtagatagaaaagctgaaagattggggatgttagaagtaaggtcactgccaataaaaatatatttggtggaaataaactctactcataattctgaaagatgattacatagtgaggttcagcagagtatatttttcaaaacatttaaaagaacattttaaatcttctcacagtgaagcatggtaactgttccaggggttgtgtatgctaatggttctgaaaaatgatgccattacaagaaggcaaaattgcaacaacaccttgtagccacaaactaatacctgccacctaggcctctcaaaggtacaagaattactgggtggcactctgcacacagccctgtcacagattctactaaactgtcaccttctggaataaatgagattagaggcaggataaggggatgtgagcagggtagggaatctgtggaaatacctgcacttccatgtgcttcctattccaggtaaaactttgaatatggaaaccccattttttctgcctaaaatcaatggcatcttaaattttattttcttaaattttaaaaaacattcttggcttaacagaaagggctcttcttttgcactatccttaggcccccatcaactccttggtttgatgcattattcacaaatgcaagtctcctatattctcgcaactattcctggcctcaaattcctactgaccccttctctgcataaattaaatgactgacattcaaagagggataggacattactctctttcacattcacttgctgatgtaaaggaattgaatacctatgaaacagtccatagcaagataaacaaaccatatttgctggtctcctgttgctatctttctctaaaataggtggaatgtgttatttttataattactttaggaaaccacactgtgtttaaaagagcatcttatgaactcctaataccaaagcaaaacaaaacttatattatttcaaagcttataaacaacctccattcttaacaccaaatatacatttttgacaccatactttagatggggtagcagagttggagacagggagctgaggtatttatatggcacatggaataatttcatgttctttaagcataccaaatactaaagagctttaaatatgctggagctcattcagggacataaatcacttgcaaaaacgggaaacattttgcctgtatgtggaaagtttgggaaaaaaaaaatagcttcttaaatacatacactgctctcatatggaaatggaatcttttgcatgactctagataacagaaggaaatgtacaagctacaaagaattttttttagaaagctggagaatcaataatctactaattaaaatgttccaaagtcaaatgaggagcttttgtgatggtgagcacccatctctggaggcattttagcagtgattatgtagcacctgtaggagagcagctgggtggaagagggactatatgtcagaaaaaatcgcatctattctatcgtgtccccaacaatgtgagaaacttccataatttgtgaaaatagcattctcataattagcttgttagatcccataggtcataacagttcctcttgaaatacttcaaacattcaaagctttgggtagtgttgattttcatgatgaaagataattataagctgatttttggacacttcatggtttcatgcagtattttgtttcacctatttatttttagtttctcatgatgattgtgttgaagctaatatttcggcctcccagaaagcattttttatttgttaaatgatgccaagtaactttccaaaatggttttattaagctgacaatgtctgattgtggctaatatggaatttgaattgtttcttgtatttgtgaaacttttatcagctagactggactgacctactggatggagagtgcagcattgttggtgttttcaacttgcctctctgctaacttcccagagaagaaactcttttcctaacctaggatctcccccagcccttctgaagagtccttggtagtctgcacattttttattgggtagttaactttagacatatgttggagcttaccccttgaccattatcagtattgtaaatatttatcttaatctagggcatgtattttaggtctatagtgacacctgatggacagcagttatcttttgcatatgtgtgtatctgtaaaggcatgcattggagttaaaatgtgaaattactaattatccatagacaaagtgtttattattaaaacaaactgtccttttcaaaagtagattctggaaaatattttaggaatttacttctatttttattgttttccaaatgttctaagaatataaatcatcctgagaagatggccatttgcctttcatccctctagagtattttctttgtttctttagttagatgttgttaagatatttgaaaataatgttcaaatcaaagactttagtgacagttgtttggtgatgtaagctgaacaatatttttgtttaaccacaaaaggatgggaagaatgtgtttattaaacttttattgtaaaattcaaacagaactaacaaggacaggaactcaagcagattgggacttggaggcaggagctgtttagagagaccatggaggaatgctggctttcttaaatttgagtttgccttggccccccaaatgctggggtcaccaccttgcacagctgtgtctgacttgacaggcactcttaactaatgaatccttgtgtgactgtttaaaatgaagccttaccagttgaactgaattcattacatttcaaaaaggtagcattgtggattttctcagtttggaaggtttcaaaataaaaaataattgaaatttgccatgcatataattttgagatggtaactggaaaggtaagaaatttcaagaaggagccagtgtgataccagcaatgcagtcctttgagttaaacatgttaatgtaagtctcccttttccatgtcatcgtggatttagtattttatttctatgctcattcttctttctcaaatgtcattctttccactcttcattttgaaggaattccacaggtattatttgggtgaaacttaagaccacgtattgtacagttgaaacagtgggaagaaagtgtgattagtacctgggccagagtgtaacaacatacttgataatgaggtcaagctcacctcactcacatcacatgagattgttgggtggtgtgcattctaaatatttaacaagatcctataattgtggattccttaaaaaacaaacaacccccccaaaccccatgcatgtatttccttggaggctcaacaagatttccagtgacttttatgggaggctggttagactaatgcacttagaatccacccctctaatgaggcatccttgaattgtgtgtaatggttttagcatattctccaagggagaacggaagttccaaaacagaggagcttcagactgtggctactgtggcaacagcccaccgcaacaaacagacttggtatagagaccattagactccatctcaaatgttctttttggcattctccaatggtttctcgcttgacaaatgagcctatcattgcccatgctttttctgaattgaactttagggcttgggaagttgtagtctgaatctggagtttttgctttggttattctataaactcctttccaataaaatattttcatcctaaatctctataagtatcacacagagatttagaatctataattgatatgacttaaaagggtattaaactgaattccagggaatttacaattcatgcatatttaatatatcgtggaattattacggagtatatttatattagtgatttatttagtttctttttggtgcctaatctgattaactttgctaaggtgaattgctcggccatataaaacactctggatctttttatccatctgtattgaagataaggctttcaagtgcaggaaaaattagtcttcagaagagaaatagtcaatcagttggtttttgacaatcattttgtttgttctcttgaaagaaaattgagatggctttgaatatctggattcaagcctgtgaatttaaattgtttattttaccaattctagagtttaaatgttttaaaattagaaaaatcttttggaatatttgtctttcattgattttcagatcaaaatatacatggcaatgattagtaagccctaaaaatcagatgtccccttttcacaatatgtcacactgtgcctttgagggagtagtctaagaatgttttaattttactatccccaacaattggaacagaaaaaaataaaaaccaaaaaaaaaacacaacaatcaagaaacctttaatgaactttttttcaaagtggcttctttattggaattaacttaagaattcatttgattattctagattcaagaaatgtaggatttaaatttctgtattactgtatggtggcaaagactgaagatatagaattgaacatgaatgtattttgatgatggttgaaggaaaaaagacaaatgtacatatagacaaaagcaaaaggtgttggtgatgcttgttagaagtagtggaatgaagtagggtggttaatgagtccgatgatctggcagtctgtgatatgacaatgctcccctgggaaagtaaagttggaactgagagatgaacgacaaaaaagaccagactaacaagttgtggctagaagattaagatgaagaaaaccccaagaagaatgttggcatgttagaaagatgggttgagctgcagtggtgggatgagacaaggacacttttgaatttacttcctcgtcctcagaggtttagacagagttgggagttgatgagacatgatggtttctactttatggactataaaaatggattttacacacaatcacagtctgggaaaatgaattatagattatggaaaggaccggtagtgccaggtgggaggtgataacactaattaagcaaaattgaaggtggcttagactgggtggcagatgggagatgactgaagttgtggtataatttggcaacacataaattagctgaggatgtgataaaagagaaagaggaatggattatttgtttttgttttcaagatgtggataatggagtaaatggtggtggcattttcagagggaggaagtaatgagatgactttatgtttaagagagtgaattaggagatttgccctgaagatggaaagttaaggtgcccctaggcatcccattgaagatgttgaaagggcagttagtgtcactgcgggaagagttcagtaaagaggcaggaaaggggcagggaggtgttctgttggctaaaccaggcataaagcaaagacttgaaaaatgtttctcttattaaagtacttggatatggacagcagattaaatgagtgtgttagggttactagaccaagaaacttgggaagaaaagtgtttattcaggttatgtttgagatgactttatgtttaagagagtgaattaggagatttgccctgaagatggaaagttaaaagaagtcaggacaggaggcataaagcaaagacttatagattaaagtagggacttggagaaacttgggaggagtttccaaatcacagcagagacaggatggaggaatgctgttttctggtttgttcctcacggcttgctcagcctgttctcttatagaacccagaaccaccaccccagggatgtcaccaaccacagtggatcaggccctcccccatcaattgctaattaagaaaatgccctacaggtttgccgatcttaatggtggtattttctcaattgagactccatccactctgatgaccctagcttgtgtaaaattgacataaaaatagccacttcaataagtcaagttgcatattttaacatatctcatatttatagatatttatagttaagaactaattacccatggtaactctatgaactgaactgaaaattctttcctattttctaaaactgatattcttaaagcagcctttcttgaagtgtgggctagggcatttctaagtgttccttgaggtcagatcacataaccccagcatgctatttgttttctgtctcattctcttgcgagcatattctggaatgttgtggaagcacactctacagtgcaatattatagcatacttaatgtgaaaacaagaaatacagataacacactaagtcagaaatcaacttgatttcttcaaagtataaaataatcacatttcttattaacttttaaagattatttagtttacaattttaaaacattatttattctgtaaaagaattattatttgaagtgaataaatattttaaagatttctgcttttgtatatttattatacttttgacatttttatacatttttaattaaaatataactacataacttcccccttttcttcctccatccccttttagttctccctcccatccttcccatgttcttcccccaactctttggtctctgtttcatttatgattattgttagatgcatgtaaatttatacatatgtgcatatgtatgaatagacacacaaacatgcacacaaacacacacacacacacatacacaagctgttgcattggtttttgttgtttgtgtatatagagtttcagggctgacttctttgttttggataaccagttaggaggctcatccatgaaagaggctaattctccctgtctcagcaatccctagttgctgtagtttttcgtctatggggggaaccccacaacattttctccctttcatattaacatagttaatgactgccatggttctagtctggtatatgcggccatttctaggtgacactatttcatggtcttccttgtatttggactttgacaatattcttgcttccttttccaagatgttccctgaacaatagatgcaggagctgtgatgtagatttatccattggggcctggctccaagggtctgttgatcttgtgtcagtttgtggttttctgtggtggtcttcatttgctaaagagaagcttctttgatgaggggtggcagctgcacttatgtgtgggtataagggtcatatttagaatgtgtttagaaactatgctgatctagggcagggatggtggtaggttctttgctaaggtcattgtgatctctggtcctgggaagctggctaaatttctagtaccagtcatgatttctttcctcttgagtgcaccttaaaatctaatgtacaaatatcaataagataaaccacatgagcaaaaactttgggggattttcaataggttatattatcatcgttatttatttatttatttatttatttatttatttatttatttatttatttatttgagacagggtttctctgtgtagctttggagcctgtcctggcactagctctgtagatcaggcttgccttgaactcacatagatctgcctgcctctgccccccaagtgctggtattaaaggcatgtgccaccatgcccagcaggttttagtattataaatcagtccagaagctaaaagttacaacaacaacaactgtcttacgctataaacctatagactaataagggcactgatgtttgcttcatgaagcatattggcattggctaaagcttcaggatgtcagatattgaggcctttcccctaaattttgcataaataagaccactttccagatgtgtattaagcgaaggcttggtgattagaagttggaaacttttgcaatgtttggcatttaaatcaagggcaaatcgcctgtgcagatatgagtgggcaaataactcccattgaagtgcttattattgtgttaattacattccatttcacagcttgaaagtatccttgatgtattttgtgggttcagtttcacactttctaatgttctagaattgggaattgaattgggttccccagtaattatcctgaattagtgtagcaggctcctgaaattttttgttaattagactgctagcccagaaggaataaaggaatcaaatatttttttaaaaatctactcagcattttaggaaggaagtggttttatactttgccgattactcaaagtctcattagatctgacattttatcttttgattactcagtacaataactcttctaataccataaaaggtctcaaattaaatcagaaagtgcattacttcacacatggccccatgccgtttgtacagtttgtagctttcatacatatgtaagcttaagctgtcagttgttgattggtggggatgcctttcttaaaattcttattgctaagtgaaggcttgagatctgggcttcttcctcttgtgctacatagtgcaaagagctttgatcatttgctagcacatctacttgttttgatatctaaccaccatggttctaagcacttttcatggaataagctggaaaaaaacaacaaccctcaaaccaaaggatgttgttttcttccttttgttgttcttgaaagacagtattctcctttttttcttttaattcagctttataagtcacagtgagaattaaggcagtcatcaattggatagagaggaagtccagtttaggaaccctctctactgatgcttagggtcttaggtggggtcaatcacagaaccttcatccagcaactggtggaagcagatgcagagatcacagctcagcactgggcagagctcttagagtctagtccaggagagggagagggaggggtgataatatgggcaaataggtcaagaccgttttggggatacacacagaaacagctgacctgagctagtaggagctcactgactctggactgacaatgtgggaacctgcataggaccaaactaggccctctgaatgtgggtgacagttgtgtggcttgggcagtctgtgggccactggcagtgggaccctgatttatgctggtgcttgaactggctttttggagctcattatctttggacggataccttgcttgcctagatttaggggggagggcattggtcctgccttaaagtgatgtgtcagacattgttgactccccaatgcaaagccttatcctctctgaggagtggagtggggatggggagaggggaaggtggggggaccatgaggaagggagtgggaactagaattggtttgtaacatgagaaaagattgtttttaaattaaaaatgattaaaaattgataagtaacacttaaacaatgagtcacagtaagagaaaaggcttaagagtgaacacatacaatatattgtgctgaaaattaacttttttaaatgtcatagttcagtgttctctgcaataataggttttctttcatgcttagaacatagactttccttcacatagctaaactgctgagctaggtgtctgtctccctgtgctttatgttacaagctctagccttttggtttcagatgtcaggtggagaaatggccagagaactaaaagccataaatctcaggggcttaatccagatccacccattaagcagctgtgtgaccagatagacatgattgaaataatcctctttgagatttgtctattttgttcctcaactttatagatgacatcatcctttctctgtaacaatctgcccagagtacaaaccagggggtattcaataacaaactgtcctgtcggtcagtcctgtgctctcaactgtccctgtttgactctgctttcattcatgcctccatcacttcttgcttgaatttcccaatatttcatcttggccattctgtacttaggtttatcctacttttatgcattctgtaaatagccatataatcaggagctagatattttaaaatgtattcattgtatcccatccccaagttaacatatccagtgccctcctgtgattaaacatgcaaactcttcaggacagaaagaccctacactgaaatgaagtcagctgcctttgggacttggcagatatggatctgaattctgatccatgtagctagttatgtaagctttggggaatgttctagatattttttgcccatctcctttcttgtcagtgttaagtcttgtgtctgacatgtgggatgggacacttgcttacctgttctactgccacccagttctgcatggcctgctctataatcagggctcaatttttctgtgtcccatgtgtctgtgacagtacatttttcctctgcttgtattacatgctttcaaatgctgtggctcttcagaatcaaccaatgtatacattcaaagaagtctgttatttcccagtagtggaattatcttatctgaagagcctagcatccacagtgtcctctgtatagctctttacccaggttgtgttttattaatttcatccccacatcttactgattcaggagctactcattttacatatggtctacgctagtccctgttctaaagaatatggttacagtacaaaaatacagaattgtgcagcatgtttcttatgtcccaacagaggagatacacaatagaggtgtgtgtgtgtgtgtgtgtgtgtgtgtgtgtgtgtgtgtgtgtgtgtgtgtgtgtgtatacagtagatattatgaatagcaaatatggaggtggtacctcgaacggtagctggattgtgtggcatagtcaaggaagatgtcttcgaaaattgagcattgaacagggacataaatgagttcatgaagggggtaggagtattggagactgagaggaggaaaatatgctatgttctagatgaggtttgggctgaaatatccaaatgacagcatggatagcagcatcgatagagtggaaagaactgggtggttataggggtgaggtaggggagccaaacaaatcagtgaggtagcagatctcagatatcacaggttatgctgatatcttttaaatagtttataatacttcacactatgtttaataaggattccttgtcatgtatgagaaataatatttttaatggcaggaggaagttgtgttattagtgaaaaaattgaaatagcattgatcttgttttggaattaactagtaaaagagcagagataagaaaaaatgtcaagtttagagtctactttgaaagctcagaaaatggtgtttgctagttgattggattgattgattgacatagcttgcaagaggaagtaaagagtgatggagtcctgactttgactgaaatatttgcaatagcaaaactgtgttttaggtagcaatttagatgattaataaggaataacactaccagacagtatctggaacacaattgttttgtggtttattgtatcagagatcaactaagttgaactagcaaagaacttctgaaacgagttagtagttaagtagttaagtataaatgtatttttgttttgggcagtatcctagaagtacgtgcaggaggctggttgaatagcggcacctcattgggtgatttggattcccaggtctccagatgctatgctgtgtatatggggaaagttagatcatcagctctttgatgctgtatcccaagggaatgggaaataagagaaaagacaggaagccttttgctcaaagtcacatttctgttctgttctcatccctttgcccaacacttaattacatagaggctgtcaagtcatttggggcagggcctaggcccaaccctgtgtttccctgatggaaggcatcaccctccctggggagtggatgggggatgggggggttagcaggggggcatgggcagatgggagggagagggaactgggattgatatgtaggataagatggtttcaaatttaaataaaatttctataaaaattacagagaggctagaaaaaaagaaaatctctgcccaatgagattataaagttgcctcaccaacatgaagaaagacaggctgaatcctaaggaacttttgtgctatacttgaatatctcttataagtaacttagggttggaactgtgttctacacacctcagtactcatccccatgtctgtgtacatgtgtgtgctcaccacatgtacatctctgcaacatacattttgttatttttgacattatggcacctttgtgcctcttgaatttttatatctcttatttcaaatgatttttaatatacacttatcagtgatacacagttataacatttctattactacttctatatgtaatataaataataaacttacatttattatttccagtgccttacatttattatcactccagaatgaacaagccatgatgacttatcatttatgtttatcgagagtatttatgtcacacatttgcttccacataacaatttcagaagccaccatcagtgatgaaacagtgagtcatcactgtaaaataaaattcatcacctactccaaactgcccaattctgtatgtgctgctgagtttttactggtattatttagcttaaaagttagaggagatgtatgtggatccaaggatatattttgaaaggttaacaaacaatgcaacatttaagaaatacatttaaaaacagtttaagcagtaccaatactatgtaaagttaaagtttagtaggaaaaatgatacagctgataaaatgttgaatacttaggaaactgattgttgatatgttagaggtaacatatttcccttggagagcttgggtttattctgtaatatgaaataagggtggttatattgttttataatatgatatttttgaaaattggttttattttctttccaagatcaattactatatttataatctctgtaaatgtataattcattaggtcttcctattcttgggaaacatgcatcactttctaaacatgctcaatggtagtgactaacctttgagtatttatttacaagtactcatgtcaacgtccatgtatcaaatatatatatatatatatatatatatatatatatatatgtatatatatatatatataatttaatgaaatttgttcaaaatattaaagatatggatatttgataatgtttttagtctatcatagtctgaagtctatggacataaaaacttgtcagtatttctcagtacttaacccaaagacagcaagtagtatttcattgacaatcactaattgaattcccatggaataccttataatccctccaaacacacacatacacaggaagatgtgcaaagctatattaatttcactccagattttctattatcttcttacagttttaactgatagtaaaatgtatgacttttgaagaacttccagttgagagttattaagtatccagttaattctgaaaattacctaccagttttcactctagatgaaacttttattcatttaatttaaaaaatatcatacattgagacttctaagctttccaaactcactgttgagacttcgtaagacacagcttgaaaatgtgtttgtttgatctagcatattatcatttgaactgtgaaaaatttcaattaagattcttgtatttggtgtgtgtgtgtgtgtgtgtgtgtgtgtgtgtgtaaattctcaactttttaaaaacgttgtcagtgagactcacaaaaatctatgcaaatttctcatcattgtagaatcattgcccatcatgctcaagaaataacttagtcagctaaacattgctccaagtaaatcaaagaaaattagaaaaaaagattagtaagaatgcttagcttttcatatcttataatatttgcctataactaaattgaaatttaatttcacaaacttatttcatgcatgagaaatacattccttcatcacaccaaagatattcatttctaaaagtgtccaaccttttagtcaaattgctagatgtaaaaacctcagaaatgccaaatctttcttgggtcctgattagatgaactatataaatcatattgcatttcttaaacttttatagaactgagtttcataaaacctttaaccattgcgttttcctcatttttgaggtaactcaacttaataccctgtccttaaatgattttgtaataaatgaagagctggtcatcacattctgctcaattgctattgttcccaaggctgaggacaaggagttcctcctcaggcaggtgtgtgacttagtgtacctgtcaagaaaaatcaggtgttctcatcagaaaactaagcatgtcaagggaaggttaagtatctaaatttagagatacatacacatactgtgcatgtgtatttatttaataaattgcattaggtgccatatctttgtgtaatttcaagtttgtcattaaaggaaagaaacagtgttgagtaagtagctcaacttttatagacttgtcttgtaatttcctctaagtaataaattaatgatgccttccccaaaagtgtgttaggtgaagatggattggttcaatcatgggtatgaaatgttccacaaaaggaaatgataaagaacactaaaatgtatactaattcattttagcccagggaattctagtacttactttctcttcattttctaaatatatatatgtgaccaaaagtttatttatattagtctataggagcgggaatctgaaaaggaaaatgataagtgcctagtaatacactcttagaaaagaagaggggtaagagtatgaagtaagggaataaggtgagaaagagaagtaaaactcagcgagacaaaagataagtctttgttttcagtctccagaattgctagtctgtcattttagctacactactgggtactataaagaagttattaatcataactatgattttagtattgctctgtggatttgacactattgtagtgattattcatatgctgtatttcccaattcattgattagagccaatgttaatagcattcagcacaaaatgtcaatccttctatttcaccttttaaattgaaacttctatttgtcctacttcaaagtagcacatccaagctccaatcagttctcacagcagcatgctctgtcaccatgttcagcgtttacattttctgtatttgtttctctgtgaaggacagtgtagaagtgcttgtttatctgtgctctgtttatcttgcagctaacattttaatctatgaatttaccagtaagattgcttatgaagtgtgctttgtaaagcagaccatttgtacaaccagggctattagcagtgtgacaggtaagctattaatctagagacatgtgcttctcaagtctgagccagcagagtggcataaggtacatgatctcatcatctacataatacattcatttagattaaaagcttttaaagtttaggattttctccatttgtatgtttaagcttccaccaattgatgcatagtaaaaattctcttgctataatgcctgtgtattaaaaagttgggactcctgcaatggggccttgttgtcagtttgtggagagcgatctatatattcttggcaacagcctgagttttggggatttccatacaacccctttggctaacaactcaattggatgtaaccctgctgcagtaccagaagctttgcttgttcacaagtaatgtgcaatcgggccatattgtgtgagaaaaaaaaatctattttcaatagatggaaaaataggtgcgtaatacacttaagttaaaaaaataattgaagttggaactcttgctataataactactatttattttcataaagcagagttttatactttgattcaaattgttttcagtaataagtttgtcaaaatataaattttaatcttcacacaaatgtgatccttttctcctagaaggtagaaatcatgagacctcattcaaattctttcccagtgttcatagccaacatcgtttcttctatcaaactagatggacttgttttttgacagctatttcccacctctgctactcaagttcattggttcatgaagtatgattcctggaccattgagttacagcttctatacttggttcctgtagcttttagacatcttagaaataaaatttcagattccattgaagacctattgagacacaatttctaggaatgttttatctgccatgagtttccacagtaagttctttaagtttttgcaattgtttatataatttagcttcctatttagttgcattcatgatgaggactggggtttatgagtaatcatatttttcagatcttaggtgccacaaaaatattggttgaataaagtgacaaattaatgcaaatgataaaataactaagaaacacaagccagctaattggaaaaataaaggagggttattttatttgaaaggctatcatctggaggctaaatgagatgtgatttttaaatatctgtgggcaagaattaaaacatgtgaatacaaatcatgagagaataatttgattgcaagatattttgattatttggcacacattaaaccctcaaattcttattaaacccaagccacagttctagaagtaggtgttagattcattttgtcaggttatatgtagtggaacagatttccaactcaaatctctgaattatttcttccaccatatatagaaaatcaaattgcaactctaaaagctcattatctcaatgagttaatgggctaataaagtatctatataaatatgaatcaagcacagtactaggaatatagcatgtaggatcaaacatatacacatgttgtagataacaaaagttctgtatacatagtagaatttctatgatgataaattatgctatcataattatgctatcccaataatgttaaagtagcaaacattactaaataaaaaataaaaatggaaagacggcattgtgaagtgaatttgtaatacaaatacatgattgagattgtgtttcaggggacttttctctgaaacaatggtgttattgttgccaatccagctggtaaagtatccatgactggaggaaggggatctcaggcatagagtctacaggtactgagccctaacacttggagtgggataggaacagaacacagacagcaggccaggtttacacacatgctgtcagctttctcatatttcaaagtatctgaggtcatcacacaagtgtgtaaatgtaattgacttgacagtgaagcaacgtttctggctatgccctgtggatttaatgtggtgtcagataataatttccttaagagtagaaactaggaaataaggaaaacgttcagaatctaagtgtttggagcttggatgagtcagtgttgtgagcaaacctgaattcactatattgtcctccagttccccactccccaggcactctaagaataactgagaatgccagatggcttgaagcacttctgcccatgattaatgcctcgagctattccctaactggattacagtggcatttcttctagaaaatcttggattagattcctttccaatcatacttatcatttgacatatagtctgcaatgcatatatgatggacatgctgggtggtggtgatggtcatgctggatgaagccttgaaaaagaagataaaaattaaattgtgacaaagccttatgttatttctaagaagctctttggaagaccatactaagtgaatctttaaatatttggatgcaatttcttggtttttctcttaaagttttattcatttgttagagaggctagtcaatgggagctgctggttattgtactcaaacagtctctggccacctccgcgactgcatcacatctgtctgtttcctacagtagggagcactactgattccgctgaacaaatgatttgataaattgaagatttatgggtgcaaaggtttatgaatggaaatataattatcttctcaatgtggttaaccttcctgctaaatccttgggatgatactgatgcctggtgtatatggatttatgtattccacagccttacacttgaggcagttcttcagtcttgacctcctgagtataagatcacaggcataagtcaccacattttaataaaaaacacattctgattaaatgtcaataccttcaacccttacttttagtggtcagcatgattttgctagagagaaagttagtttgggcacacttgtgtgtcagaattcttcataaaatttgaatttgctttagtaagggaactaactgaacaacaacaacaaagagatagtaaaatagacatgatatattgtaattgttgacatgattgtaagaataaaaacaaagttatgtctttcaaacccaatgacctttctccagctacagcatttgatgcatggcattagtcctcgagacagactaacagatcttaatgcaataacatgagaggtacttgtgttctgtatctcaatattgtactattgaaatgtgctgtccaagtttgctatctaaaagaagtttcaaatggaaaaggaaaacagcaatagagtaaaaaaccctgaaatttatgctaaagaccacgttataggacgatgtggttaatacaggctaccagatatttctgtacacatccattcaatgtattcatggaaatgatgttctcatatctgctttgcatattcaggcaactaggaagcatttacatctgcaaatacacacgatctatagaatgttaaaaaaaaacctttcttttgatttccttaaggttgttaatcatgagataatagattgtactttcttcttgattcacctttgttaaggaggaactgcaaataacaatggaatgattcctaccagccagtgccctagctcttagataatttctgatgccaactagcaccgtgctttccatgaagaacatgttctgcaggcaagattttgttgtttccttccttgagtgggaaggatcctaaaataggcctctagttttttctgttttcttttgtttatttttgagattgtattttaattacaacatctctcccttccctttctctgtgcattggatgtgttactgtgttacatgagaacatttctatacatgtgtgtggcatacactgaacatatttctccatgtgtctgtattctgccatcactttcttcccttcccattaatcacctttgtttgcctagacagtttcgcttctatattcacatcatgtattcagacatgcttttatgtatccctataaaacctaggaactacaaatgagatgaaacatatggtatttgtctgagactgacttaatttgcttaatacgattagctctagctgcatctattttcttacaaagagcatatttttattcttatttatagctaaaaagattccattgtggacataaaacatgttatttttaattcctctgttgtttgatctaggtgagctctacaacctgtctgctgtgaattgtgttaaataaatgtggacacataagaatttctgtgaaagggctggagagatagctctggggtgatgagtactggctgcttttctggaagtcctaggctgaattccatcacccacatggcacttgaaaaccatctgtaactagttccagggaatgtggttctctcctcgctgcaggatactgcctgcatgttagacacataagctcacataaccacacatgcacacatatatttttttttcaaatgggataaataagtattaaaaatctctgtgatatgtgacttggggtcttgggtaggaatgatatagtggatttaaagaatagttgcacttctaaatttttgagaaccccctcatactgatttccatagtggctgcattagtttatattcccacaagcagtgtacaaggcttccatttccggatgacttccactacagagtggaattttcttgagtacttatgcaaaatcttgatgtgttttttctgataccagggcggtagagaaacactcattgtcttgagacatacagactcagatctaattcatccctttgaaccttagtagctgtgtggtttttaacaaattccagtactctgagtactcacccatgaatggaagcttgtaatggtaataattgtcctgttgcatacaaatagacctgtctaactagctcatcttgtgttgcttgttctgtttgtggggcccctggcagtgggaccaggatgtatccctagtgtatgacatagctttttggagcccattccttatagtgggatgttatgctcagccttgaggcagggaggaggggcttggtcctgggctgggctttgttgactctacatgggagatcttaccctttctgggcagtggggaggggagagcagggagttggaagagaggagggagggagaactgtggttggtatgtaaaatgaataaaaactttaaaataaaaaatgaaaagaaaaatgtaaaaaaaaaaaatctcctgacatgaagaaagtcttctgtaaataatgctctttcatttttattttgtctcatttctcaaaactctgctggttacatatgtagtcatttgctctattataatattcactgcagtcttaatgtcctgaaatttcccatctccatgcatgggaaccttcaaagacaatgcatgggagcaagtactatagtcattgtaaaaaccactcatcctcatctctatgagttcaaggccagcctggtctgcaaagctacacagagaaaccctgtcatgaaaaaaccaaaaaaaaaaaaaaaaaaaaccaacccccccaagaacaaaaaacaaaaacaaaaaacaaaacccaaacaaaacaacagcaaaaaaaaaaattctctcgctccctccctttccccctccctttctataggcatttagacatggagtctatcaacaatctttagattaccaggtggaggaggaggatcataggatcatgtaagggaagtgtggttcattgtgtcccttgtgcctcctgtctgactcaagttttcttacttctaacctaagggttggcctaaagacaaatgtacttacatctccttggctttctttgtcttctgcctctctctcttttgacacattttccccatttactagaatccagagacgctagtctttgaactagtgacagctggtgcagaagatataaatcatatttagtagacaaaggaagcttgttaacatatatgatgatttaagtatgatatcatctcatctaatttcatcctaattaagtctaatgactgggtgtgcttctctccagataataaagtatagtgtgtgaatttcccatctccactcatgaagttagctccctactaagatgagtttctgtggattgggaataaataggtctacatggcaatgcagctgtacaacaatgtgaggcatttctcattaggcttctttctttggcagcagcaaataaactttcttctagccctgctgcaaatagctccttcccatctttaaacagagagattacagggaggaagtctcagcctgtctagttctcagaactggttaggttatcttttgagttcttaatcactaccagcatccaaaaagaaattaaaacaaactatggagctccatttctttgctacacctctgttattaatttgtgtgtaacatttcactcaaacattttgaagatttaaatcttgtctattatatagttcttgtcaatgctggcatttattatcattgcattttggttcagctacactatgcagactacactggagagaatagagaatcctgggatgaacaatgtctgctcttcatccgttgcaaaataggacaaaaccttcttgtcctgtttcctggaaagatgctttgcaaaaaaatgtactctgattattgttcagagatatctaaaaagggaagatgctgtgatgctagtttgctaggagtttgtttcagactaaggccacaaaattcctctatagggctacacttaatgctcactatgctcttgatcctgttctctgtatgtgcatacatcagcccatttaatgctcatagcagtccccaaagaggtgtgttttgttttacttgttttcccagttaagaaatagaggcgcagatgggattgagtatgtgcatacatgcatgtgtctatgttggtttgtgtgtacattttgtgcaagtattcatgttggtgtgtgtgtgtgtgtgtgtgtgtgtgtgtgtgtatgccttttgttgtatgtgcacacgagtgcaagtatacatgcatggatacatgtttgtgtattgtgcatgtgttggtgtgtacatacacgtatgtacagatttgcatgcaggtgtgcatatttgtgtatatacatatgttgttgttgtgtgtacatgtgtatacaagtatgcatgcaagtatccatcccagtgtgagtatgtatgtgtgtttatgaagaagaagggacttaacatcaagggtcttcccctgtcatcttctgcccactcatatacacatggaagtcagagaacagcttgcttggatcagttctctcttccaccatgtgtgtacatgaaatcaacctcaggtaatcaggatcagtagcaagtgtcttaacctactaagtcatcccactgacccttcacctcattttttttgagaaatgatctcttggtgaacctggaactgactgattttcctagtctggctggctagaatgtcgcagagatctgtctgtctctggcttcccagtgttgttacacctatctttcacacgtgtttcagggatcaaactcagatgcctgtgttgggattcaaattcagactctcatgcttgcacagcaagcactttgtggacagagaattctgagcagtctgagcatatatttttttaggagaattcactacaagtctacaggctttggagtctgcataattagcctctgcctgttgctgcttcttcaaagcctcctgcatagttttgaacactgggacctacaaaagaatcagactcctaccttgattgaaatctgcttttgatgtggtgaaatacatagctgggacaacactttttgtgaaacatgttataatcggaattctcttttctcacgagactctttatttccatgactgtgtacacactcatattttcattcaaaattactgttttaattaacttctttggtgctgtggattgcaccaggacctcatccatgctaaacatgtgctctgttgcagaactgtgccattgacaacttggagaaaatagcataactcttccacagaagataaagcctttgagccggatgctcacaaactgaaggggttatgtttccagagactttcatgttagcatgctatattagtcagggttctcaagaggaacagaaccaatataatggataccagttacttattgcttatggtctgagcaattcaacaatggctgtcggtgtgttggggaggggaggctgctcagttcacaagactgcatggcacagaagtctcaatctgtctctgaaatgctggaggattccataagagccactggtctttggtcccgttgaactgtaaaggaagctgtgtctgttgtgatgagctattgcagtgacagtgtagattcaatgagcaccaaaaagagaatgcttccaggtgaaagctgtcctacttgccctccaccagtcatctttttacatttatttttaattactcatttacatatccatatcccctttccctccaccagtcatctttatgatttgattcccactggaaggtgatgccccttctgggggagaatgcctccacctcagttaatccttacagaaacaccttcagcgacccacccagacacatgtctcttagttgattctagatccaatcaagttgctaaccaagatgaatcctcatgtgcagaaagtaacaattttcttatggaactttcatggatatttagttttgattgatcctcttttcctctccctatacatcaccattccttcttgtactcttcgatttttccctacctttacacctcaggtgctttcacaaccagtcctacccctttccttgaagcctcctttcccacctctcatggttttctttctgggttgactcaatgaattcttcatggtgaaggctaaggataaaggctgataattctactacatatgttttttcctttacggatctgtgtttgcatgagtgtatgtatgtgtactctatgtgtctaggaaccaatggggatcagaagaatgccagatcccctggaactggaattagagttagttatgaactaccatgtgggtgctggaaacctatcctgggctcttctagaagtacaacaattgctcttaaccactgaacaatctctttagcccctagcatcttttttcttttcttttgaaatgcttttaaaaatattgattcatttattttaactgttattcttccctccattacatcctggttcccctccctcaactcctcctagtccatctaccaccctgtcacccatttccccccaaaaagaacaggccttccagagatagtcaccaaacatgtcacagttcttgaggcttgtattagggtactgtaggtagagtgcttgcctaccatgcccaaggccccggctttaatcccaaagactgaaaaaatattcaaagttctttttttggttactttatatttatctgtccaaacaaatagaatgtgccttgaagtaaataaagttcattttaaatattcatgacagaggttccaaagggcagtaggtttctttgtcccagaaagccatggtgattgccacttcaccagaaacgaatgctttaactataagtctatgtgcagcttgtaggctgtatttggttgtgcctgaaaaatgatacatatgaggtctgagaatgactgctcttagtatttataactagtagcatgttcagatatttagaataatcaatggactcttagtttccttagaagtgtgtggctgaaagaaaaacccaataagtatctaatagataatgaaccttatctagattttcgacaaagaatcctggaatggattacatatgacatccaacaaacatgccaagtctactgtttgtgaggtcaacagggtcatcaagcccagggcataccactgaagagtcttcaggaaggattgaattcagtcttagatgaaaaccctttatacttgatctgatttagtactgccaactaggaatgaacagccccgagataagtcggctcaagccagacctggtcatcacaggggaaaacagaattgcatcctttttgttgatcaaaagaatgaagtctgtaatgtttgtaagacaaaacctggctaagacaaaagaccaataacattttctctatttcctctctttaaatgatgccagatgaatcatagcttttattttggtaggaatattaaagctattatgtgataacagtactacagtaatttttctgctttatgtgccttacagacttggaacccataatgtgagaaaaattcaacctcattatctttatagcccatcactctcatcaggcatgaccaatagattgatatttgcttctaggtcaaatctctttgccactcctctaccaaaattaattgttttaggcatgtccttcagtataagcacacagtcttctaatacccatatgatatggtttcctttcttctaaaatcagtgataattgtgattagtatatttcatgagactttggatactttcagtgtaaattcaattttttaaatattaacatgaaaaagttggttcacagctatcctttctctaagagaatgtttgtttttgttagatcactcacagagaatgagatttcctaacagctactattcaagaatttgtacttaatagaactgagaaactttatctgggtagtgggatttttatagttaataaaatatttagaatattcatgcctcaataagaaccctcttgtttttttatacatcattttagtttatgtagttttgttttgtagttcccatagtaatttaggagaaaacaaataattggaaattgtcttatgtgtcacttagtaatggttgaggcaaaaccaatggggagtttctcatttcatttcgagatgattagctagatctggaaagttatttcatcagcaggttatgtgtttattttctattttactcattaaaactcaatctaattaggcaatattacttagccagtgctctggggaccctaattctattctgtgtagttctttggcctagcttttcttgaagcacacagcaaaggagttgttcactgttttttgcattcaagtgaagatgtattattagctttgccatttttttgggcactgaaaagccaccctggatgcacatcccataggagaagcctccagagaacagatctaggagagaggccagttgatccctctgtgaccaaaagggtagtcccatccttgaagcattaagaatctgtcttgacagacaactatagctaagcatactgacaacattctttacactgtcatcaagtgggaatctaccaagtactcagtctgtcccatcatcatggtcaacaccacagcattatgaagcccgaagatatttatgggatctccagtgtcacagtggagtcttgaaaaaaatattgaccctatttagggcttatttttactatccaataataacacatataatagtaacttatgagaatcaaatgatataaggggttgctaataacacacctagtaagtattcagttggcagtcagttataaatattctcaagctcagaatggtgttttgatgtgcttttttgaattatgacattctatttataaaataactatcaagatgaaatagatgccacatcactgcattcaaacagatataaattggggtttattttgttttgatgtttggttcttgaatcttaaaatgttttaatttagaaaagaaatgtaaggtggctgctgaggtggttcagtgggcttgcttccaagcctgatgatgtaagttcaatcctcagaatccacatgatagaagaaagaactgaactccatagcattgtcctttgacctccacaacaccttcagatgtacacatctgaagtagttttcctagaataaacccaaaatgcagacttatttaataaaaggaatgtacattgtaaagtattgattaaaatgatttttaaaataggtaatgcatttctgaaatatcaaaaataataagacacaaagagatgtagatttaagtgtttttctgtctttgttgtatactaacaagttcccatccgcctcttttcctgactgcttttccttaagaaagtgttttctagtctttctagagaggtatgtttccttttgtttgtttgtttgtttaatactacattcaatcaaataaaaacccatgccttctctctaatccctttatacatagggaagcccggaagacacattctgctttctttcttatctccaaattatgtttttgtttggggctgtgttctgggctgtgataagcatcaaaaatcaaaccaggaggaaaggagtttatttcagtctacacttccaggaggaagtgtaccaaaaccagaaggaaaggagtttatttcagtctacactcccaagttccagtgcattgttgagggccatcagggcaggaactgaagcagaagcaatgcaagaatagtgttttttttttgcttgctctctggctccttcccatgcctatgatcctctagctttcttgtatagcactagttcacctgccaagggttggtaatgtccacactcatctgggttctcccataccaatcatcaatgaaggcaatgtcccacagacatgcctacagcccagtcttagctagacatttctcagttgagacttcctcttccccagtgactctaggtctgaaaactgacagtagaatctagctgggacaagctcaggctacataaaactttattgatacacatagcagttccagctttactctgccaagctgtaataagtaatcatcaacatacactatttgtgtcttcaagtatatacattgaataagttttcagaagtaggcttgctggtcaattgaataaaaatttagtaattttatgaaatgttgaggatcactcactatgaagatgtaatatggttattccttcttctagccttgacagaagacagtgctattaaactgtcagctttccttcaaaatagaagatgagatgatattttatagtaggtatagtatattgctgttcttataggtgaaactgagaactttgctcttagcagcaatttgcatttgtcttcaacttcctttaagagtttgggttttttgcttgtttgttcgtttgggtatttttttggctatgaaaacagacttattttgtagtagaattcaccagtttttaatatatctataatgactttagagtattgttacaaaggatttttttattctgaaattgcaaataattttcccatgactcccctagaattcttgcagtggcttcctctgttctcctcccttttcattcattttgagctcttatttattggactattttgtcggtgtaagatgtcagatactgatccaacttcattccttttcttttggggtttgtggatgtatatgtggggtatgcatgttcacacatatgcactgcatgactttatgcatgtgcagctgcagctggggattgcaaatggatactcatgcctgtggaggctgaatctaatggcgggtatcttcctccaccctgcttattgagacagtgtctcttggtgaacctggggctcactaactgcagctggtctagctagccagattgcctggggaactcgtgtctctgcctccctagtatgaggattgcaggtacaagccatttctacctggcttatattggtcttcttgggtcagaactctagtcctcacactggcacaacaagtactttagtcactgagtcatcttccgtattaaattatttttctaaactccctctccattctatgaaatgaaagcatgtttctgtagaaaatagataggttctttatcgtatgttgaatttcattttgcttagctgtttccagaacttcgttctgttcatttttttttctgttaccatgccttctcaactccctaccctgcagtcaatttatattgaaaacttggtttagtcatttattttctctgtgtatttcaagcaacgaaaaccaaaagagtttttgtaaaatatagctgtaccaagcccctttcaagtgttccactaattttctaagaaaaactctagtatgtattttgaaaatacttttctaggttttctagtttttggaaaatttatcagattaccaagtctctgtaacaaacctgttgtttccacttgtaaattgtggtttccttgcattctcagcagaccaaaaggcttttcttctcttccaatagtccacatgatatgtgatgcattgggtccttgggggaattccatggcatcccaagtttgcaactcacctagattactttacaattgccctactctctattgtcttttgaccatataacatttgcaattagctcctatagttatcgaatgagctcgaaaggagacaccttattagaaggatttttttaatccaaacaacacgtatgcattatgagaactcacaattccacctttcttcaaaaacacggtaatggcctttctgttaggtttcagttggtttgagattgcacattgatgctagttggtacatgttttatctatgacccaggcattgcttgctaagttcattcctttaaaaagattttcttgctcttgcattttaaaaagtctcaatggttaatttaatctctccaattgtagcatatatggatgctatgatttgagtattttgtttgcctacatgctgatgaattttgccattacttatagtaatttttcagctgattcttttttttcctccagatatcagtcacaacctttataactctgaatagtgtttacttcttttaaaatcaacatgactctaattgtgttcttaaaaaaacatatgctgataactgtcttactgactaccaaaaaaaaaatctttttgttaaggaagtgtgtattgacacccattcattgagtactttctatctttaatttttaaaactctactaatttgtttgttctttgacagtttcatgcataatatagtatattgattattttacccttacccatgcttaactcttttctatctctcttactccctctccactgtccaaatccctttcccacatccatgtgtttttgtgacccattgattttaattagaacatcagtgtaaccagagatgtggaaatatccattggagcctggtagactcagaatccatcagtagccaatagttcagcaggaagggtgggacctcatgagtccctccttaatctatgattgactattgaaccactcagttatgtgcagacaaagtacaagcaaccactgttcaataggttccagcttcagggttctacagccgtagagccatctagtatatctctcctctaactctctttttaacattctttctcaagttggtttacaagttagtagatttcctgagaggtttccgtatttttaatacatccttcatttgaattaacatttccagaactagtacatctatagctatctaattttttgccaccttcccccccaaatcaaaaatacacatgggagaaaagacaacatcttcaccaaatggttccagaaaaataagttacccacaggtaaataaatgacaagtagctttttctcttatcctatacaaaattcaactacaaatggaagaaagatcttagcataaaacctggaactctgttgctgctagaggaaaaatagagaattcactacaagatacaagcattgggttctagattgattgctcacagttaaaagtacatgctgcttttacatgttggctcacaaccactagaaactccagttccaagggatcctaactagtcctctggcttcctggggcacctgcatgcacatagtgcaacatagatagcccccatgtacattcatataagatgcaaagtaacaaaatcctttaaaaagcatttggggatgcataaggtatacctaaataggacttcagttactcaggaaatagaaaaaaagaattgataaatagaacttcatgtagttacaacatctctatgcagtcaagaaacttgtcacacaggtgacagacaatctgcagaatggaagaaaatctttgccagctatgtttctgacataggatgaggatctagaatataaaatgttctcaaacatgtaaacataaagaaacaactccatcaaaaatgggttctcaaactgcataaaaagttcttaaaacaagaaacattaatacctaataagtacttttaaaagagtgttccacatccttagccatcaggaaaatggaaattaaactacttggagactttctttcatatataaaaataactgcccatatatatatatatatatatatatatatatatatatacatatatatattatatcaatatatatcaatatatcaatatatatatcaatatacatcaatatatatatcaaatggcagagatgccatcaaagttgtgaaaagttggaacctattaactcttggtgggaattagactggtgcagccaccatggctagaactagtcaggtgacccatcatatatcctaaagtataagtaatatattttattaaggaactcttaaattttgtcaaatgtttttcacaagctattaagatgttttctttttattatgttttaatattttctaatattcaataatctttggtattttacattttaatgttgctaaattctatctgtgaatagcttacctgtgactttggtataaactgctgtggcagtttgagtaagaatggccttcatagataatatatttgaatgcttagtcaacagagagtggcactatttgaaaggattaagaagtgttgtccttcactatccttggggagtgggtgggtggattggggggttaggtggggagcatgggagggcaagggaatggagggactggtatgtaaataagagtgcttctaaaataaaaagaattttttaaaaaagaagtgtggccgtattggaggaagtgtgtctctgggggtagactgggaagtttcaaaagattatgccaagtgtagtgtctctctctttctggctgtggatcaggaggtaactctcagctattgctctggtgtcataaatgctccatattcctgctatgatgatagtggactaaacctctgaaactgtaggccaaacctcaattacatgctttcctttatgagctgccttgaccatggtatctcttcatagcaacagaacagtgactgagacagttgtcttatgtaagtctggccttagtcagtcagtgtgtctgtgcaagaatatgcaagcaaggggcagttgtatagacaatgggtatttacccagcacagcaggagatgcttacattccaaggggtctagaagacatcttctcttttgggtttgcaacaagaagtaatttttctaattattcattctgtaaaggttcattgacagtctatgacagtatactagtacactgtttctttttggttttgacagataattttctcagcctcaattaagggaggaatctatcttcactttctattctttctagtaagttttgttaaattacacacactggtttgcttgattgtcccaagagctttttttcatgtctttaaacttgaatattattttaagaatttgtctcatgaaaaaaagctcactaaagtaaattccatttttattacatgtataatgtgttcctgcaatgtggttagccttattattttaaaagctgcaagtctctgtaaagttgcttggactctggaatatagtaataaatactaatagtgattaaaaaagaatatgtctcatgaatactgaattaattacttttctgttgctctgaaaaaaataccatcaccaaagtgacttgtagagaagcaagcaatatgatagtggagcaaatcacaccctgatctgcaaatctggccaccctttcctgaccccagcatacacacattttaaaggattccttgttcttttcagttatgtaggtgtgtgtgtctatatgtatgaatgtgcatgtgagtgcacatgcccacaggtgtcagattccttggagctggaggcagaaacacagacacatccatcgggaaccgtaggcatcttttgaaacttcaaagtccacctacagtgatagaactcccttaacaagggcatacttcctaatcctacacagttactccagctgagtctgaagaccaagccttcaaacatgaagcttatggaacccattctcttgaaaacggccacagagactattcctatttatgtttcccattaattatattcttttttttcttttcaaattttttatttaaattagaaacaagcttgctttacatgtttcccattaattatattctttttttttcttttcaaattttttatttaaattagaaacaagcttgctttacatgtcaatcccagttccctctccctcccctcctcccctgccactcaccaactctctatcccatcccctttgtgctccccaaggagttatagtcctgaaaccagtttggtattggcacaaaaatagacaggtagaccaatggaattgaattgaaaactctgatattaacccacatacctataaacacctgattttttttcgagacagggtttctctgtgtagctttagagcctatcctggcactcgctctggagaccaggctgccttgaactcacagagatctgcctgcctctgcctcccgagtgctgggattaaaggcgtgcaccaccaacgcctggctgaacacctgatttttgacaaagaagctaaagatatacaatggaataaagaaatcatcttcaacaaatggtgctgacataactagatgctggcaagtagaagactgctgatagatccatgcctatcaccatgcacaaaacttaagtccaaatggatcaaagacctcaagatacatccaaccacactgaacctcttagaagagaaagtaggaggtaccctcgaacgaattggtggtacaggagaccacttcctgagcataacaccagtagcacagagattgaaatcgacaataaatgagaccacctgaaatggagaagcttctataaggcaaaggacacagccaacaagacaaaatggcagcccacagaatgggaaaagatcttcaccacccctacatctgataaggggctgatttccaaaatgtacaaagaactcaaggtaaacccaagaactcaagaatctagtcaccaaaacaccaaataatccaattaaaatttggaactaaatagataattttcaatagaggaatctcaaatggctgatagacatttaagaaatgtgggtgttagtgaggaggcctcagaaatatatggggcctcttgtagtatattagtacttatctctagtgtaggaatggattttgggatcccatttcacacagaggggtactccctcagcttagacacataggggagggcctgggccctatcccaaaggctatgacagactctaaagacccccatggaaggcctcactttccctggggagcagaaatggtattggataggtagggtgttagtggggaccaggggaggaggggagggagaggaaacggggattgacatgtaaaacaatcttgtttctaatttaaattaaacaattaaaaaaagaaactgcccaacatcttcaaccatcaaggaaatgcaaatcaaaacaactctgagacagcatcttactcctgtcagaatggctaaaatcaaaatcaccaatgacagtttatgctggagaggatgtggagaaaggggaacactcctccactgctggtgggagtgccaacttgtacagcccattaattatattcgtaactactcttcttctgcctaagtttcaagtaggaagaaatgatgtacacataagatgccccttgcctttcttttctcttatccactcaactcccttatcccctattatgttttcccttctcatttattcttctagttttcttagtatgtctttttctgtaattttatgctccttttactttttctccatttcttgaatggctgttttatgttaataattacttattaaattagggcaaatcatacctcttcctttatcttcaccacttctcttttgatgtatttttttctgttttgggcagtcagagtctcagtctggggtaggggtgggagcaaaggaagttggagaagcaaactggaaagaagaagccagcaggcttcccctatcttcctgactcctaacagagagcatttaaaaacatctaatgccaagagattgctttctacagagtacctcctatacatcttcatgggcatatctatatgctttcctcaactactgataatgatattttctatttcattggttgatgcattttggtgtcttagtatgtgaaagaactgccatttctgagatctattaatgctaggccacccccttcctccttccacctgctataatttgaaatgttctgcacagacccatgttttaaatgcttcatcaccagctataatgctgaattttcaatgtttaggagatgtatttgggggacataagaaggtcatagaggtgatgggaaggcatttgaatttggtacctgtcccctcggagaccctctgctttctggcccagctgcatgtgaacactcactgctgtttgccacagtcaccatgctttcttctaacaatggacagaaatatccccgaaatagggaaccaaaataaaattttctgcttctaagatgtctgtctcgggtattatgtttacaatgatggcaaagtaagaagtatagctacccttccacgatctcagtcagtacacaatatgtctctggatttatttttatgtatattatctgtatgtgtgtgtgtatgtgtgtgaatgacaacagatgctagagttaccagatactttggagctaaccaaaaggcagagaaagaacaggcaaattaacaaaatcagaaatgaaaatggggacataacaacagacaatgaggaaattcagagaatctttaggtcatactttgaaaacctttactccacaaaattggaaaatttaaaggaaatggaaaatacacaattttaaggtcagcagatgacacttattttccactttttctaaaagtgaatcttttaagggcctttttctttcctttactcataaatctcaaatactttacaagaggagaaagaagttttgatttatagtcctactgatgctgaacagccacctgaatatttttagtatttttattttattttttaaatcttagttttttttttttataaatctcgataacctgggaatggtacaggttgtaaactcaaataaacaacaattcatataaaattaattgcagaagttctccaaagggctgatcccttccctacctttactggaaatgtgcaaaaggatattggaaaaaggatacatatctatataaggacaatagagactgtctcatttaattaaaaaatcttagctattctctcttgagaataaagtaactggaaaaatataattttagttcaaaatgacaatgataaaattataaaaagtaattataaaaatagagtagagttattaaaagttgaccctttctctttgcatttgtttctatcagacattcatattcaaccaggtttgtttctcagaccaaacaaagcttccagtttgtttcagaatattgatctactaagtaaaccacctgggaaacaaatttaattgattttgatagaaattattcttatactgaaagacagaactaaaagttggtctacatttctccaaatcaattatccattttgggtatttttgttttgtttctgtgatggggtttctctgtataagccagctagcctccaactcatgtgctatgcctcagcatcctcctatggtgaatttactttaggtatgtgaacttcttttcttctcagatcataaagttatcatgtccaaatactagttgcaaaacacagttagaatgaatggcagtaatttttacttattacaaacacattactcatttgtatgtgtttaaggtctattaagatggctttaaacatccaaagttcgttgtctcttgcttgggtttcttgaatacttgacctaggtaacaatattattctgacagaaaagaagtaatggaattcaactctcatgtgttgtgtggctctgattggtgcagtgttctttagctttctgtcttctgttgctcctaactttagttcaatgtgaatggaaaatcaggagcatagaatcttctgagttgatctttcaactgaggctgtaaacacttgaaaccattttcttgtactatatgataaacactgagaaggaaatgagggctaacagagccagctgtgtttattcactctggtggcctgagtcttgtctgtataaaggatctttttaattataactgacctcatctagccatcggttttttttttgttgttgttgttgacacagattcaaagaggaatagttcacacatgttgctagattataagacatcttgacaaacagatttatgctccatatacagaatgcttcaattctttacaactttccaaagtaactcttaatgtctacccttcatgattagttatattaaatatgatgtatggggctggagagtttgcgcagtggttaagagcacttgttcttgcagagggcctgggttcagttcccagcactcaggttgtggctcaaaaccatctgtaactccagttccaggaaatccagtggtctcttctgacctctgtggttgccatggacccacatggcacagatacatacatccaggtaaaacactcacattcattaaatgaagcaatctaaaaaaaaaaaaaaaagaacaaaatccctaatattctgaatgtttaattctaaatttttatgcaaatctcactttattctttaaagatacatttgcaacaagttgacaaaggatccatgggaagatcttgcaaaaaacagtgtgtgtaaagtagtcacacttttaagtggcatggtagttaattcttggaactcatgggagactgggtatttctgatgtttgtcttgattgtttagtctaagattggtattctacagagtgaactgtggtaggcatcaccttctaaacctgaaataactcaaagaccccataagacaagtttgggtactattccatagcaaattcaaggaaagaattacatcctaagagcaagacccgaatatcagttagtttcgagctgtagagtctctaacaggactgagatgggaaaggacaaggagaaagttcaggattgtggactctgtgaatggggcagaagtgtccctaagtgtggcttatggctcttagcctccttttgtgaggtagaaattggctccattaggacatcactggaaagtgttactccagcctcttctcataaaagtcatggcctcttgagagacttagaatagccttgaaaacagaggttcatctgatcctcagtaacccgggagtgctgagataaatggagaggccccaggagtgtgctgcagctgaggcttttgcacagtccctggaaagaagctctgcctggggcgagcttctgacaccctgctccttcacagccagatgctcctatgatgctcagacaaactgaacttctgggctttcttcctgtcagtttttccatagtcaaaatagcatcctgcttccagggactccaggttttctgacttcactaattaaatgaaattctgtgttcttcttagagacaaaagaggtgaccaggcaaggaaggcaaagaaatgaaactgatggaataacatttccagtcagacatgttattttatttgttattattctttgagactaaataaaaaaatgtagcacaggttgattttgaacctccaatgttgcacaggctagcctctgacctcagattcacctgccttgacttaccaagtttgggaatacaatgtgctccgacgtattcgtccatgtagacatttcagacatttgatgacttagagtactagcaaattcttacattccaatgcaatggaacttgtgaaatgaggagcatagaggtttttaatacacacacacacacacacacacacacacacacacacacacacactcatgagagatagactatgtattgaatgctaaactgtctgcttagcatttaatgttttaatgttgtaaaatacaaatttgtaaacagacaagtaagcagttacatgaaaagcacttggttttgtttgtttgtttagtaaataaacattgaatgcttagtaaatgcaaggtcccatttgacaatataggctgaagcagacagcatttctgcaaagcccgtaagggtctgggttcaggataaaatatgagtgtagaattaagcatagaaataaaactaacaccctggcagtgcttggcgcccatttgtaaacactgtgctgtatgcctcccatttattatctcataccatccacagcattctgtgtgagagctattacactcaatttgcagacatgaaaactgaagatcttagctatagaacgtcttagtcagtgatacagaaattgtgacttttctgcctgcctggtgacaatgtagtcaaagtacttggttatgtgtatgagcaactgtgtgaaagaaatcaccaaacacttacattcataaagccaatcgtatttaaaccatctttacaatctacaagcagtttaactttttggcttacattttaatgtttttattggcaactatgtaactaattacacgggtagctattgaataagttaaataataactaaaagacaaaataagtaagggaagtaaatagaaatcactgaagctagttttccagatcatggatcatgaaaattatttcactgaggtctatgagtggagtaaattgaaccaatgaatggagcagcattgggagaaaaatctaaatgatcagtgcaatggaaagagattagcaaggtagacaaggattaatcactgtgagaatgttagcaaagtgtgaaatagtatgtgactaaatacaacataaggccattgagagagagggtagcagtggatgctggaaagatactcctaaaaaactgctgtaaaacctggatgccctggcatgttgtcctgcctgcaatgctagtaccatgtggaggccagaacctctcttttcttcctttgcactaccttccattgtgatgaatactttagcttcacacattggttgagctttaggttttgtgtctctgggcgatcacagagctggaactgagtcattgtagtgctgccatagttaagctaagtccttgcgccttcagtcttcacctcctacaacgccttggtgaaagcagtagagcagagtctggagacaggtggctagccatgcattcttatactcctcatgacttatttgaacttgaacttgtacatccctgtatatccagattattaaaagaaaacaatagctctcaaattgcacattgtaaatgggctgaacacatcatgtctatgaaaacactcacaaaagagtaaaattgagatagttctaattagatctcatctttctttttcaaaaataaatatttatttttcttttatgtgtgggtgttttgcctaaacctgtgtttttgcaccacataaattcctggtgcctgcggaggccagagagggaatcagatgccctagaattagttagagaaagtcataggctgccttgtggatgctgagagaacccaggtcttctgccatagcagtgagtattcttagcctccaagtcatctctccatcccctgaatctgatctttcttaatcagcacccttatgatgtcaagtaacttctgcatcttggttttataaattctaagatgagtggaagagcactcatctcatgggtttgttgtgaagaggaaatatgttgtaatgattcatgcagtacctggcttatatattgcagccactcaaaacattaagtggatttccattttaattacttatttccatctatctcctttcctagatgtgagattataatgattacactttagttttgaggccagtgattttatttcatgctaaatgctttcaaattatttatcttaaaaaaaaaaaccattacaaccaatctacatgatgattttttaattatacccattttatagacaataaaacagagacttagaggtataagtgccttcttgaaatcacacacataacagaaccatgactggagggcaaagagtaagaaagcagaaactccactgttgaaaagactgtaaggtatataggaagtctgtcacacacagtaggtccaaggaatctctcttgtcttcgttaactgacatttgcttttactgtagtaccagggaatacatatgataaagtgtgactatgtgcctcatgttgtggaggtctatgctgtgtttgtatttttatgctatttagattctactgagtctaaagtggcaggtgtctattttccgacattcttcacctacttgattaggaatcctgtggaccagccccatacacatggtagaaaacttccttactatagattttattataattgtttttcttcatttaaaaaataaccattgcataatcagatattgactattttcatataaatgctatgggctagaattagctccatcacaaaataaaatctacaccactacataatcagttttattggacacttgaaataaaagccagcattcaagaaaagactgtgttacttttgtcaacctgtttattctctttgcactttatgttttttttcctcaagtggtttttatttttatattttatttatttgaactttatgtgaacatttttctgtgttagggttcctctggaactagagttacagtgagttgtgagcttccttgtgggtgctggaaattgaacccaggtactctgaaagatcagccagtggtcttaacaactgagccatttctggctctccatcttcttatctgaaaattaagtgggttaaaatacgtattttcttcaactttaatatcccatgactcttgacacaaaatgctgtgatttgtgtaggtgactatttggggataataaattacaacagaaaatgtagtctaaagggagagatgtttcagggttaaaagaatggtcttctcttccagaggatctaagttcaatccccagcacctacatcaggcttcttacaacttccaatatctacagctccagaagattctgtctctcctggcataagtgggcagctgcacacacacacacacacacacacacacacacacgcacgcacactcaagaaaatgattatttttaaaagtaccatgacttttatttaagaatgcattcaaaagtattccccagatttttactgacccaataaaaatatgtagatgatgtaggaaagtatccctgaagaagaaagaaatctgattaaagcattcagtattacaatttttaaagtacttcaataataattttaccctgtagaaagatttgtatctttaaaggaaagtgtttattaactcaaatcaacttctaaattagaagattgtcaattaatatgaaaaagtgaagtgaaaaattccagtctcttgtgaaagacattgctggagggcagaaggattcggcagatggatcttaacagtctcgtttaatataagcatatttatctgaacagttgccatccaagtgagctccgtcattcactcaactgattcacttactcattgaccattagttgaaaacatctgttctgaactaagctatgatccaatggtaaaagtagaagtgaatactgattattgtaacacagtcattaaagtgatcagggttcatgaggaacattggaacatctcatttagctgtctgagatcatggaattcttactgtgtagtcagacttttccattgagactgttgtctccccaataacaatacatagacactattaatatattatgaaagctttgtcaataggttaggcttatttctaactagctctccaatgatgacacagagaaaggttggccaatagcttagacttgtttcattagctcttataacttaacctgattttattaatgtatgttctaccatgtatctttttatctttcttttattccatacatctgacttcccatgtctacatggcatcccctgcacactttgatttatctcctctttctttctattcctggaagtcccacctatatctcctgcctagttattggccattcagctctttattacaccaatcacagcaatacaccttctcacagtatcccatggcattactgggcagcttcatcttggaaacagtttgaaagatgagaaggaattggcatacattactgctcaagggatactcactgactgacagaaattctggagaagaaaatcatgaagatataatagaagatttggggaactcaacagtttgagcagggctggctttaatcactgtagcttagataccaccagcatgaaatattaaagtttatgagcctaccctacaattactaactcagaattgagggtaggttaaaagatctttgattctatttatttattctaaataaatactatattttgggttgatttgttatatataacattttccagaatcaatttatgtcagaaagtgattaaagttgactaactaatgggccagatcatgaaaaatattgtaagacatattttactttatttttaagttaaactataaaaatgataaattaagattttaaacaaatgtatttgcatataaaacaccacattctgaaactatagatcgtgtgcactttcagcagcaacctcatttttccagaagtcgcagtggcaaggattgtaagggtaggcttttgtatgaaatgtttgcttataaataagatgtttacaaatggcataaatttatgttgaggcagaacaataacttccaaaatcaagctaatcttcgtattttctatctacaggtaggagataggccagggagagggaacacacaaaatcttatcattcctaagaaagggtacacgtgagaatgtcatgcaaaggtgtgatgctgttggccaggaacctgtcttgtagaaactaagctggacttttccacctgctcttgttagttttaaagcagagatagagagatagctgagttagtaagagtactggcagctattccagaggacctgggttctattccccgcacccagatttgtttacaaccatctgtaactctagtttcaggggatctgactctctcttctgacctcggtaactttttgaacatagtgcaaaggcataaacacaggcaaaacacccatacacataaaaataaataataaataaaatatgatctttattatactataaatatgtaacttataaaatataatttatattgtgagtttcactacaatgtgtacatacaatatcatcttcttctttgttaatatgtgaggtagttaagaaatcataccacacaaaatcataccacacattttggaacatagaataagatttctacttagcatcagaatttagtttttcaaaataaattttcaaatgtacatttaaaacatacaataaaatatctatgtccaatttttcatgttgatgaatatttttaaaattcccaatgttcaacttagtaattcaaaggcaaaagctgaaagctttattgtgttttgtagtattttgatggcatgtattgccatccattttgtctttctataaatggaacatttcaaagtggctaagctacaatcatcagaaacatactgattcaaagatctgtgggacatctaagattaaggtgctgcattttgtgaggtcctgattgtgaaatagtgtggtggaaggcaaataggtcaagaaacagtgaggagcagaactgagaactggagcagcagccttagtggatccaagagtgtagagttctccaggtctcatctcttcactgctcagtattcttaaggaagattaaggccaatggatgcactttggagaccaccatcacactatagcatcaaacatgttttgggaaacatgccttcatctgcctaagctttagcaagttggtggggctcatttggaaaacaatggtctgtgtcaagacaagacaaaacaagaataacaactacaaaacacctcatttcagatggatctggatgtgattcttagtctcattagccactgatgtggtcatcttattcatcagctgatacttactttagttaactttgtattataattaagtagctttgagttggacacatacatcctggagctaggttagtgtcacttgcatttgcattgcctccttaattcagttcaaacatcagttttcaattttccaattcttttgctgtttaaattaatcagttgaattaagatgaataattactggctctgttcctatagtaacaagtgtcacattccaacaacttagaaataaggtaggttattttcagcttctattgtttacagccttcaaaaccaacactggggatatatactttattttctctttcttagtcactaggtactaattaggagcctctaaggggaaagttagggctcaaaggtcttttgaagttaacatcaatgttaagtgaaacaaatgatatcttagctttccatttctttaaagaccataattgtttggctttcttttttattaggaaagtgccacaagtcctacatgaagaacattcatgtgctgatagcaacagaataattaacagttgatttattaaaatgtgaatctccaactaatacttattaagtacacgtttgccaggcactgtgatgggagctggcggcataccaatttcatagaaaaatacagttttggtgggtgaatttaaatcagagttggaggaaacatttgttttttgggctgtagcaggatacaaatatcaaagcatacttcagctttaaaattctaaattctctacaacattcctaactgaaaagtggtttgaaaagaaggaagaggcagaccctttgctgtaattattaccaaggtgtaggaagagaagaaatgaaaatgggatgatgaagtagaatggtctttagaagaatggacaagattgataactaccactttaagggctattggagccattccatagccaaaggtaattgttttagccaaacaatttttaccccccccctctctctctctctctctgtgtgtgtgtgtgtgtgtgtgtgtgtgtgtgtgtgtgtgtgtgtgtgtgtgtagctatgtatttaagacctgtgtaacttgttgttaagttttatatgcttactcaaataatgagcatgtataccaataattctgttacaaaaacatagacatctatacaaattaccaccttgagtaaaacttcttggaaacagctatcactctaacaaaacagggtgggaaaacaacactaaatatctttgtcagtgagaaggagaagaactgaaaaaatagttgcctgcttttatatatgttatttccatcctacatacttaaataacataataaatatgctctttcaacctgaaatgacctgggatttgctggtggaagtaagttggggaggactgtagctcatgagttactgagaaatggcaaaactgtacagcagcttcttgtcttagatgtggttgggtgtgacccatggcaccccgaggcaattgcataatgcgggcatcttttgtagcttacacaacttgattcaggttgggtgaattcaggaccctcttcacaggaaaatgcatcacaaatccgttgctttggtagtagtttaggagacactgtagtaccaaagataccacacctttgtatatgcacacaaaaataagacttcattcaacttcctgtgggtgaaactactcagaatcacatgtagagtctatgttgtgtttaaattgttccctaatatctgaaaagtgctgggttagagttttattccactagaaggacaataaaaggagaggctatgtgtctctctcctcaaagatgcaattgatgccttgactgggcatccatctgcttatgtttccattatttgccctgttgtttcctcaattaggtagtgagcccctttgctgggtgaatgctgctctcattgtctttggcatgtaggatacccttaaaatgatttagtaagaatcattaacacctattgaaggaggtcccccaaccatggaagaaattaatcaacgcaaagatgacaatttccaataaggtaggaaaggtacatttcaaagggaagaatatataggaggatatgtagtaagttagggatatttcaaatggaagaatatatttggggctatgaagtaagtcctggagacctggaggacctcttgaggtgcagatctacagaaatgcatgcagtgtgtctgctctggacaaattggtcagagagcatctctctccttgtatactgtgtctaatgagtcaagctaaacgaaacaggaggaccctcttcacaggaaaatgcatcacaaatccgctgctttggtagtagtttaggagacactgtagtatcaaagataccacacctttgtatatgcacacaaaaataagatttaagccagtttccatgaagctgtagcctagatattttaagtgtccttttggaactgttgtgaaactgagaaagaaggcaatctctttggttgctcccacattcacttctaaatgtattattttatttatgcaatataggattccctgccttcaaaccttttgcaaaagtacaggtcagacagcaaaattaaggttgcattgtgtattgtatgtaggaatgtgaaccctgcagcatccttagtcttaactgaaatcatcctgtcttcttttcctttctcttctcaatgaaattgtaactccaacagtagggagtctctagagtatagggagtggggaagctatcttactataggactggtggcataaaaagagatattcggggagcgtcttttaaagcctggaactttcagcatgatcttccattcaaataaaaatgcagtcaaattcacagcctcacatccaaatcttaagatctgttttcccataagtgggtgtaacttaatttaaaacattctaaacacagtactgtattccttgagcggtgatttgccatgcaactgatgaagcatctataaaaacggcagtgaaccatggaaagatgacttcagaacatatgctcagctcggtgcttcagttcaagtcattaggcctttcattttctctatgctgtcagccttttggctgcttgcataatagtttaagagccatttcctataatacgtatttgggaagaatgtcgagattagaagttcccacaatttaagttggtcaattagacgaacagtaaaagtttcacctaaaaatctggtataagatgctcacttttctaataggatttggaatcatctaaagatctaatgaccttataatcttctaatgaagccccacagaagtgtctgtgttcttagagcatttctggaaatgcaactccaagtttattgcctgaagaaagaggtaaggtgtagcatcatatttgctaaggagcaatttgtgtaatcatggatggaacaagatgatgaaaaatgttgctggcaatatgggtagtaaaggtgtctttttccccctcctattttttttctgaactaaaattgcaaatagctgtgttgtacatgaaatgattatatgtaacagctaacatgtaaaagtcatcagtctgaaaaggtggaaaagggagttatcagtcaactttcactgcattaataagctcctcaattagtgccttcaatgtgcataacttagcaaggagttgcacctttgcacctgtgctctttgcacttagataagagcatttgttcttctgactactagtatccatttgtaatgctttgttgtatttatatatattttcatgtggtatgaaatttcaaatgtggaatatataatttcatgtgggagggtatgaatttgtgtgtgtgtgtgtgtgtgtgtgtgtatgagttcttgtttaggccagaggtcaacccttgggtatcacatttctcaggagtgttccacattgtgtttcaagaaaggttctcactgagaacaaggcactattatagttagaattttaaggttgatacaaatttagacatacttaggaagagggaatctcagtttaggaattgcccttaccaaattggcctgtgggaatgtctataggttattgaccaatttatttaggaataagtcccagagaggtaggaatgatgggattgtgaagtgtaaagggatttgggtaataaggagtttgtacagcatagttaggtgataataaaataaaaaagtgtttcaagtaagagtctgatatattcctgtacattcatggtttacttactagattatagccatttttaggggaggaatcagatcctatgcatctatctacttcaatttgctattagtaaaatcacctgtacactgataacatttaacacatgcttacttgattattaaaagcataaatttaggcttcagtttttaatagcatgtatcttatattttagaaatttatcaggacttgtaaaatgaagccatactgattatatcccaaacatagacttgaacataatacagctggactcagtaatacaatagtcctaataggcttagtgttccatctactgaaatatcattgttcatttgtttctcattgatccaaagaagacttccacatggtaaatgattgaatactgctaagagagtctcttgggcttagtgaggcaatatttggttttctttgtaagtatttattgatataatcagtagcctgatgagctgctattagccattctgtcattaagaacaaaagtggttgtattcactagaaattgttcccaaaattctcaccttaaaactttaagagtgataaactgtttgatttttctccggatatgaattaatttattattattattattattattattattatataaaataaaatatactttataatgaattaaaataaagtattagcttagactttgtagtgaaattctttatgaaagaaatacaatataaccaacccattattttattttatttttttgcctttctcatgcaggagttaatgctgctaagtatttgtgtcattccaaaagttatgttgaaatctaatatcgagtatgattgtctttaaagggggccttttcgaatataattaggtcatagagggtaaaacctttagggatgattctggtgaccttacaggaagagtctgaaaagacttcttcctttctgagtttcatgatacagtgaaggtcacaatacagggaaaagttatgggaggttatcagtggctgcaaaatgcacaatagattttggtgtttataaacaatgttatagagccactgcctctaatggatagtaagtgagcaggtgtctgtgtgtaagaacattctgacatgcttcgtgtaggagggcagagccatttctttctgtggtcatttcttctgaacagttgcttactgagcaagtacaattttgtattgactatgagctatcacaagtctcacaagagactcaatagctgatgttggtgacaacttctctagaatcctttgggtagatgttaccattccccagctcttgtagatactgtttgcttaaaaattgtaactatagtctttctacatgtgctggtcaagatgcagagccctgaaagacttggggaatttcatatcagttacaaagaggctggatggcaaaaggctgactactgcagcttataacatccagactgttcacatgggagcggggtgggggaggggaagcgagggaggaagggagggaggaaaatctctgtgggttagcctatacactagaggctagtctatttcttaacacagaagtaggctcaggacagatttctcttggtgctatctctatgtctggctccctctgctgatgtggagttctttcacttacactgcagcaggtttcttctgagaccacaaaattcctgtttcatgctttatctcaaggaaaccatatctactttcagatgtggagagtggtcagaccattctcaacagaatcatctctcctgcagaccagtcttagtcttagaagacatacagtcttttcaaagaagacataattaataaagtaagtggatcaagtttataaattatttaaggaagagcatagagtattttttcaaagagatacaaggatggtgcttgaggacaacaagaagaaattcttcagttacattattgaagatcttcgaaacaagatgatttaaggttcctttgagaatggccattaggccattttatctagtgagaaatggacagttgccattatgctatattatggtatgcctcggaagctagggaacttatttgttctaaaacttgaaagatggtggaaaggcactgcatgtttctgaatatcaccataattctgttgaaacgacttcagctggtaacaggtttgctacaaagaatggatattagtggcgggaaataaaagctgaaaagagcagtaagtttaacaacaaaatgagaaaatgtgaaattccacagtggtgctgggttcagaatgaggaaagacattttggaagtagagttgatgagacttggaatataattggttacagagagcaagagagggagagagaacagagactgggttagtgacctcttagtgttttcccagagtagacttatggtactgaagaaaacacatgccagtgttcttttccaaaatgcaaacacttgggccaggggtgatggtgactcagccagtacaatacatgctgtacaagcttgcggacctgagtgtgatccccgacactcacacaaaagccagacatggtggcatgcaacaggaatcctagtgttgggatagccaagaaagactgacacctggagtttgctggctagctcttctatctgaatcagtggccttcgtgttcactgagagacctaatgtagaaaacaataaagggaaacaccaaacgtttacctctggcctccacatgcatgtactagtgtgtatgaaagcatacctctatatgtatatacacatacacacagtattattattattattattttaaattctgaatcaatttattggtaggaaatgccatctcaatgttatattcattcatcctgaaaaatgttacaagcaaatgcaaacttattacctgattttgtcacccatcacgattcatgagctgagaggggtacacaaacctttcttcttaggttttcatctctcttcaaatttagagctcttctttctgtaggcattgtaatgctgccttgtaaggctttggtgatttatgacatggccacatcccaactgttttctgactaagggccaagagagaatgtgaagcccaaacggaattttctaggcaaccaagggcacagcaggaggtgtggcaatgctttaagaaaataaaaaaataaaaagcgctgccagcaagtcccttggttactattatgggaaagcattgtttacaagagatagatttcaacgctgcttccataagtagtgagctttacattttttgtgtgaataatttaaattctgtgggcccttgatttccaatttgtaaatgagtactttcttaaaggataatcagaacgctgtaagtttcctatatattttcaaaaggagaattttattttaactagttttgcctcttcaagaggaggggaaggatctcaatttctggcttgtttttccctggttccttgctggtacacatcaaagcttgtggatggctgggtgactcttcctctgggttgtgtaagtgacaatctgtatactttgttttcttttgctttgcctgaaaattgagacaagaaataagcaggagcctttttgctattaagaacaaacttctttcctcctctctttgacatttcttggtttcccccagagctgtatactttctggtcagcccctggatttgattctgcaactattaggaagagtttcctgttgaggtagctgcctctggcttagtgcatggaaaaactcttgttgcatcttttatttttacttcttggcatttcctgaaagtgacaggaagatgaaaagtgacctgcggtttggggtttggttctcccctacttcacagcaacagccactcattttgagtaattgagcagcttcctccctttgcctctgtgtgtgtatattcctgtgttcctccaccctctctgcatctactgggaaagaacccctccttaataacacccccccacacacacacacattctagtgtacacttgacttatgcctttggcaacatcatattcaacagaataattttctagtgagaatatctgtcaccacacagctaccctgctgcatacagacaaggcatgtgttgcaattattcacactttacaaatgagaaactatggtagggacagaacaaggtactagtgagtccagactggaaatgtagctgtaagagggttttgttttatttttatagacacagggagctttgaaaaatgtatgtgtcaagatctctaggaagatgcccattgccatagagcacactgagatgggaatgtgtctggctctcctttggtgattttatgagttcgtgcatccatggaacaaaactcagtgggggctgatgggatgatacctgtgcttttgttatttgcagtgggggttatgagcagatgcagtgtctgactcagtgaggcaaacaaaagagaatacctgccattcctgagcatggtcctcactcttctctgtggatggatttgcttatgcaattgcttttcctgaattatatatagtgacctttgtcctctagtcaacctttctctggcaactagatcttttaattctgtgttgtgtacctatgtgagttccccctcaagtcatgaacctttcatagcatttagtggtgtatggaaacaccaagtgtgtggtagtatatgcactgataggaaggtgagtctttcgtctgcaacaaaagtccactggtggtatgtattgaatatatttgaaatttaggcaaggaggaataaaaatcatcatttttttacttttcattattcaatcttctggcttttattgtaggtccactgaaagaaacttatatgtatactttcccattttcttttaagacataccagaatttctaagcagttactagtctgttaggaatgtaccaattaccggtgacagagccaaacagtatttttggtttgctgaagtcaggatgaaaatcaaaggccttagaaccaaaacccttcaaggcacagctctttgaactgcacgggatcattgtcctcttcctgtggaaactaggaaccagtgcagagctagggtttgggtacagttctctttggaagagcatcagaaaaatgactgatctttcctagatcaggtttgtgtcatggtttcagttcagaatattgtcacgtaagttgaaagctgctggctgagaaaaccttacaaaggcgcccttgttacggtctctcagtttggtaagtaaattgtgtctgactctagttgctggagaaccagaacttctaagtcagagtgtgagaactggccagggtgccttgactggggttaagggattaaattcaacactggtaatatccatttctagtctttataacgctctctagcctgccagttttctttttttctttttcttttttttttttttttttttttttttttttttttttgctgcaaactgcacgaggctttattgtaatttaacgagctaaccccatgttagctcgggtctttcacccacccgccatggcggatggctagaaaagatggctcctaggggctcccgaaagatcttatagggcagtgtagggggagtgtctaggggtgcacacaggctcacgattggtgtgcctccaggcttgaagggcttgccctgtgttgattggtcaactggttgttatggcccataggccctcccagggtggttgctatgctctctatgtcatttctgagtgcttgtccttaaagcacacccagggtcgtaaagcatagcgccaccagctaacttccgattggttccttgtcacgagacaggcatctgactttctagtgactaacttctgatgggttccttgtcacgagacaggcatctgacctctaagtgaccaaggcctgccagttttctacaaaggaaaataattaacctgattaactctcaactcttgccttcctttcttgtattagtggatataaaggtgcctgaggcagcccttaggcatttatactataattaacactaaactcaatgggacaaaactagtccttctcccagcatcattctctgtgttggctgaaagtcattcaagatgtttcaacaaatcacatttgcagttacccggactgtaccttcttctccttatcttcccagactcatggatatggatttctttcagctttcccagagctctgatccattacctagttccactcagacactaggacaggacgctgttttactacaaccaatcactcttctctcaaggaggaggaatgaggtggcatcttgctttgctagtaaacttactgtggtagccacaccctctggacgtggtttcaggttcagatgtgaccccttataaggtagaggtagtgctggctcaggctctcttgggttgcaatgagagcatcagaagggcagagactgcatcttctggagcagaagactggggtggctattactcttatctgtgtgtttccctaataaatacctgattatcatttatcttaggtctggtggactaatttaaacaccaccatcagaggaaccctcatttcctctatggtgatggtccaagtgccccaaacttgctttgccggcagatgagttgcagccaaagcagcttattttatttctttctgaaattcttaaaacttacagggtatcccattatttctatttcttttctttgtcagtttttttttttttattcctacctccatagatcctggtcagaagtaacttttgatttctatattgtccaagctttgtgtgttcattactatgtagacatcatacacctgcttccaaatgtaaactttttagatgtcagcttcatattcaagttgctattatgtctttcataagtagggattcacaagagattgaatacatttcaaggtttattaaaatagaacatagaattttgtttctccaatctctcttaggttcaattatctaggtaagtaagaatttaaatgtaaattattggtttttactacccaaagcaggaattgtatctggtcattgagacttctttggtgggaaaaaataactatgaaatgtgtctctatatgagactgcatacatagataaggagcaattaatatgcaacactgcttaattactgcaaaacaggtgatactgctttttaaagatatagtaaccagagatgataacttgttgtggctcagaggagggaactgcactgatttctgataaaggaaggtcaggtcccagggtctctagctgtatccattgtaatgttccctggcgctctcctgagggtcaaggaagcacagattcactgttagaaacacctatgatgggttggtggggggatgggaggacaggagggagagggaactgggattggtatgtaaataagattgtttttaatttcaataaaaattaatttaaaaaagaaacacctacttggttagtagacttccctttgcagtattgagcatgggaaaaggtttagggaatgaaggaataagaaagcatttgttttcttaaacacttagaaggggctttcagaatacagaggactttggggaatttcaccagggcaaagacaggcagaggactgaagatgggtggaagacacaggagggagacaaggcaacctggacaggcccaaagctggggaaatgggagtttttctttcactttggacatgctccaccaaatgctatatttgacaagtgctgctaggacatgacaggaacactcctaggagtttatattcttttcactacctgcctcaaccagaataggactatggggtagaaaattcagaggagatggcatattaaaaattgacattaaatcatgcactatccctgttacaccctgtcaatttatctcctgaaagcattttgtgatggaaaaccgctactgagctcactgggtttgggtaaacggaggccagaagattttcaaatggctttaaaaagttgacagaagaacctctccagcaacaggggaagaattggttttcttaaactatccgtaagtcaggtttccatgtctgtgtggaagggagaaacaaaaagatgtgtttttgatgggtgctgatgaacagatgaaaactgttgtctgtttgagatgctttctcctgtgacgtgaaggagtgtgctaagtgaggggtgtgcagatatgcagtggttgtactgagttgccagcctcctctagctttcattgcaacccatgtccctgggcattcatgggactgcccagggttgaatccagtgatcagataagtttttggaataaaaatgttgagtccagctaaagttcaacgttatagaagttacagaatgtgtgaacactcacacatttcacatactaacccactcagcatttgatgtccaacttactctctcattgaaatataataatgatgattgataatgaattagatctatcactaacagtagagtctaattttctgctcacaggttacattcttggaatattatacttgctgcatatttttttgccattttgcctgaaaacagataattatcacaaagagcagattggcataaatgagatgtgaaagcaaaacccaattagtacacagaagttttgacttgttctatttctttcattttctgtttttgaaggggcttgaagtgttccttaagaacaattcccattgccctcaggatctctctggctgtgttcaggtgcaactttccacggacatggagtagttgaagtgattgttcatagtgatgactttttcctggacttaattattggagaatagtcaacagtgtgccatgactttggaaaatcatgcttgttttggttgaagtgtttgaagaatctcttccccggtagcccttttaatgcatcatgtagtaattttatctcagtaaagaatgagcatttacacatgtatttctaggagagtgatttttttcagaagatgactagaatgtttcatatggagtaaacactcatttggactcactccctgcctgagcagatgttggaagaatctgcaatatattcttagtgaaatcagtgttgtaattaggttgaaactcatttaggactttttaaaaataatatttcttgccgggcattggtggctcacacccttaatcccagcacttgggaggcagaggcaagcggatctctgtgagttcaaggccagactggactccagagaaagtgccaggataggcttcaaagctacacagagaaaccctgtcttgaaaacccaaaaaataataatatttctctaaggtataaagacaacaaagcttagttttaaaagaacttaaagtgaagctgtagtggtattagacagacagagagagagagagagagagagagagagagagagagaggggatttaagaaataaaaatagatattgattacagtcttcacccctcacctaggcaacttctctttgcaatagactgagactgttatagaaaactacaagtgtgctcacctcagcagcacatacactaaaattagaatgatatagggaaattggcatggcccctgcaaaggatggcatgtaaatgaagcattttatatttttaaagcaagatattttatgacaaagtcaaattcaatcaatatctatccccaaatccagccatatagaaggtactagaaggaaatctctgatgcaaagaagttagctacacccatgaaaacacaggcaatatctaatgctacaccaacaaaaccccaaaagagggacacacatacacaccaccaccaccaccaccaccaccaccaacagcaacaacaacaataacaaaataacaggatttaacaatcactggtcattattatctctcaatatcaatagactcaattcagcaataaaaagacacagggtaacagaatggatattaaaataagatccttctttcttctacatacaagaaacacacctcaacatcaaagacagacattacatcagagtaaagggtttaaaaagaaggaaaaaaatttacaatcaaatggacctaaaaagcaagctggtgtagctatcctaacatctaacaaaatagacttacaagcaaaattaatcaaaagagatggagaaagacattttatattcatcaaaggacaaattaaccaagttgatgtctcaattctgaacatctgtgtcataaatacaagggcacccacatttgtaaaagaaatattactaaagcttaaatcacatatggaacccacacattatgtaggagacttcagcactccagtctcaccaataggtagtctagacagaagctaaacagagaaataatagaactaacagatattgtgaatcaaatggatccagcagatatttacaaaatgtttcacccaaacaccaaagaatataaaaggaaccttctccaaaaatgaccacatagtcagtcacaaagcaagtctctctctctctctctctctctctctctctctctctctctctctctctctctcacacacacacacacacacacacactcacacaaaatggaataactctctgtattttatctgattaccttggtttacagttggaattcaacaatacaaactacagaaagcctacaaactcatagaaatgaaacaactcttcactgaattaccactgggttaaggaagaaataaataaattgaagacttcatagaattcaatgacaataaatgcacaacaacccaaacttatgagacacaatgaaaacagtgaaaagacaaaaattcccagcccaaagtgtctgtataaaaaaaaaaattggtgaaatctcatactagcagcagcacaccggaaagctctagaacaaaaagtaacaaaacacccaagaggggtagacagtaggaaataatcaaactgagggctaaaatcaatgaaatagaaacaaagagaacaataaaaagactcactgaaacttcattctttgagaaaatcaacaggatagacaaacacttatccaaactaactaaaagggagagaatatctaaattaacataatcaggaaaaatgggggatataacaatagacactgaggaaatccagaaaatcattaggtcatactttaaaaacctatattccacaaaattggaaaatctaacagaaatgcacaaatttcttgaaagataacaataccaaaattaaatttagtacagataagtaatttaaatatacctataactcctacggaaataaaagtagtcattaaaagtctccaaacctaaaaattccaggaccagatagtttcagtgaagaattctaccatacttcaaagtgagctaataccagtgctcctcaaattatcccacaaaataaaaacagaaagaacattaccaaaattttttatgataccacaactctgttaccaaaaccacacaaatattccacaaaaaaggagaattacagaccaatttccctaatgaactttgatgcaaaaatactcaataaaatactggcaaaccaaatcccagaacacaccaaaaagatcatccagcatgataagtgcacttcatctcagaaatgcaggagcagttcaacatatgaaaatgtgtcagcataatccacaatataaatcaactgaaagaaaaaaaaaaaacacatgatcatctcattagatgctgaaaaagcttttgacaaaattcaacaccgcttcacaataaaattctaggagagatcagggtacaaggaacttacttgaacataataaaggcaatatacagcaagctgacagccaacataaaattaaatgcatagaaactcaaagtaattccaccaaaatcaggagcaagacaaggctgtccactctcctccacgtctattcaatgtagtacttgaagttattgctagagcaataagacaacaaaaggagattcaagtggatacaaattggaaagcaagaagtcaaagtatcactatatgcagatgacttgatagtatatataagtgactgcaaatattctatgagggaactccaacagctgataaacacttttggcaaagtgactggaaacaagattaactcaaaaaaaaaatcagtagcactcatatacaaacgataaaagagctgagaaagaagtcaggaatcagtacccttcaccatagctacaatgtaaaatatcttggggtaacttttaccaagcaagtgaaagacatgtatgataataacttcaagtttttgaagaaagaaattggaaacaatatcagaaaatggaaagatcgcccatgctctaggactgataggattgacttagtaaaaatggtcaacttacctaaagcaatctacagattcaatgcagtccccatcaaaatgccaacaaaattctttacagaccttgaaagaacaatactcaacttcatgttgtaaaataacaacaaaaatctaggatagctaaaaacaatcctgtacaatgaaattactgctggaggtatcaccatcttgattatcaagttctaccacctagctattgtgataaaaacagcaatgatattgccataaaaacagacagatggatcaaataaatcaaatagaagacccagacataaatccacacaacaatggatacatgattttttaacaaagaagccaaaattatacaatgtaaaaaagaaagcatcttcaacaaacggtgctggcataactcaatgatggcatgtagaagaaggaaaatagatccatgtctattgccttgcacaaaactcagtccaagaggatcaaagacctcagcataaattcagttacactgagcctgatggaagagaaagtggagaatggacttgaaagcattggcacaagagacaacttcctgactagaacaccagtagcacagacactaagactgacgattaataaatggaacctcatgaaactgtcaacttctgtaaggtaaagaacactgttaatataacaaaacagcagcctacagaatgggaaaagatctttaccaacactacatcctacagagctcagccttgatgggaggcagggggcttggtcatgctcaacctaatatgccaggatttgttgtctccccatgggaggctttatcctttctgaggaatggatagggttgggggaagatgggatcagggggaggataagatggagggggaactctggttcatatgccaaatgaattaaaaaaataaaatataaaaaggaactcaagaaactagatgtcaaaaaaccaaataatccaatttaaaaaatggggtacagacctaaacacagaattcttaatagaagaatctcaaattgcagagaaacacttaaagaagtgttcaacatccttagccataaggggaatgcaaccaaaaatgatgctgagattccatcttacacttttcagaatgcctaagattaaaaccacaagtaacaactcatgttggcggatatgtggagcaagaggagcactcctccattgctggtgggagtgcaaacttgtctagccactttggaaatcaatatggcagtttctaagaaaattggtaatcaatatacttcaagacccagctataccactcttgggcatatacccaaagaatgttaaatcatacacagggatacttgctcaattatactcatagcagcattattcacaaaagccagaacctagaaacaaactagatgcccctctacaaaagagtagataaagaaaatgtggtacatttacacaatgaaatactactcatctgttaaaaataatagtaggaaatttgaagacaaatggatggaactggaaaaaaaaattatcccaggtgaggtagcctcaacccagaaagacaaacatggtgtgtactcaatcgtaagtggatattagctataaagtaaaggataaccgtgatacagtccacaggcccagagaggctgggcaacaaggactgcccaaggggggaaaacatggatctccctaggaagaggaaatagaagagatcttcggagtggactgaggggttggtggaaatgggaacttgtaggattagggttgtggagtagatagaggggaagaagtactacaagagatgactggaaatgggatcattttggggtcaggtagaaacctcatgcaagggaaactaccatgaaactacaaggatgacctcagctaagactcctagcaatagtggatatataacctgaattggtcatctcctgtgatcagtttggtgactaccccaactgtcaccggagagtgttcatctagtaactgatgcaaacagatgcagaaacccacagctaaacattaggcaaagctcagagaatcctgctgaagagagggaggaaggattttcggggcaggagcagtcaagaacatcacaaggaaatccacagaaacatctaaccttgtttggaggaactcacagagtctaaacaaacaaccagggagcccgcatgggactgttctaggccctgtacatatatatatatatatatatatatatatatatatatatatatatatatatatattatatatgagacagttgtgtagcttgatcaattgtgaaactcctagcaatgggaacaggactgtcctgtccttaaagctttggctggctcttgggaacctattcttcatactgatttaccttgcacagacttaatacaaggggaggtgcttacacttactgcaatttgatacaccatactttgttgatacttatgagagacctgtccctttctgaatagaaatagaggtggagtgaattgagggggaggggtagagaggaagtggggtgagaggtgggccaggcaactgcaatcagaatgtaaaataaataaattaaatgaaaagaaaagagaaaactacaactgatgaaaatgtggagttatagaacccagttccaatggatacatctgcacacacacaattcctgcacctatggccctgggatcatcatggaagaggggagccaaaagattgtaatagccagaggaacaatgagttggctgtaagattttatctactagaaaggtcagaagctacacacatgaagtttccacaatatggctgcctaaacaagacttgaacaaggatgacacccatagatgtgctaacgtgaaggggggaaagttcatgtggcctcatcccaagactaaaaactacaggcaagtaaagaatgctgagagtcagaaaataatcttctccatcaagaagcacaccaattgtatgtctaacaccaaatggtcagccttgaaagtatacacatgtcagtaccattctatggactgagtggtttgcacttacatatttaataatacacacacacacacacacacacacacacacacacacacacacacacacacacatacacagttgtgctcgagtgtgcacacatatgtatatgtaatagcaattaaagaaaaataggtcatgaatttttaagatcgatcaagtcctggggtacatgcgaggtgagttttgaagggaagaaaggaggggggtcaataatgtaaacatattatagcttcaaaaatgaaaaatagacttaaaaatagaaaaaagataaatcatatattgtcacagttaaaatcagtcaaaatcccagcacagagaaggggcaataagcacaaaagcctcacactaagaagctaattgtaaatgataccagttgggagagggaaaatcaattttctccaacaaagtgacagcagttatatcaagtacttccagggcaggattcattctcaggagttgaccaacacaaaatggactctctgtttttgtgtttgttttgtttcttgtttcatgctgttttgattcgtttgttttgtttttcatagagaaagaacatgacataaggtgggtaaggaggttggtatctgagaggagttgggcgaagaaaaaggatatgattaaaatatattatatgaaaacttttaaagaaaaaagtcactgaataggacatctgctttataactctgttcacaaacatgtttatgagatctttgaaactacaatggtccctagtgttgaaagaacagaattttagttctccaaaactccccattccccacaaaccaaatgctgatttaaaaatgcagacatgtgatatagcttccataacagaatgatttaaaaaaagactctgaatgggtgcagaaacacatgacaagctctgctcaaccaggttccataatccatattgcatttttcaccccacaatatttgttccatgatattctggcatcatggctaaacattcagtatttggttcccagccagggcatgagatgaggacacagatttgacaggatggatacaaatcttgcacaagatagtcctcaagaacacaaataattcagtcttttgtttgcttgctgtttgtattctgtgataaggtctagctatgcagcccagactggcatcaaactcacttggtattcctgctttagcctcccaagtactgagattaaaatatgagcctcagctttatacctgtaaattgccagtgaattacttgagcactaatttgtttcttaatcactgtgcatgtccataatgacagggggctctgcaccatacagtcatgtagaaacccactttgatgaaccctttgacacagttgcaaatgtggggagatggcacagtcagttaaaagcttgccttgcaggaatatggacctaagtttgtaaccccagcacctatgtcaaagctggatgcagtgatgcacagctctaactcttagttctggggactcagagctacagatacaggaagatctctggaacacatggaccagtcaggtgagttgaactgatgatgatctccaagttcatttagagaccctgtatcaaaaaataaggtgaaaaataatttagaccagtattgatatgggcctctgtttttcacacatacatgggtaaacttgtgcattgtatttgtatgcacatgtgcatacatccacatatacagatatgcatcattcccccccacacacacacatataaagaggacacaaaaggctaccacttgaactttgaaaccttctgcctttaagtgacagatttcacctctctactctttttattgtttatataaagttacaaggccatagtcaatcgtaaaagtcagcagaaggcaaaagctaacattttctcagagcaaataaaaccattgtaagtatgaccagttcaagacctgccataaatgactagagagtcccaggaagggaaaggattagtataaattcatgattctttcagaaaaaaaggtcaaagaatatttcttggtaatgaatatcatatttgaagaacccacaaatgcagatctttaataactgaaaagcaaggagaatctttttctttaattgtttgtctatgatcattggatgaaaaattagaaatgattaaaactaatttatgatgttacagaattatatctcttgagtgatatttcttgagtttgtttttaagatttgtttattatgtacacagtgttctgcctgcatgtatgtctgcaggccagaagagggcaccagatttcactacagatggttatgagccaccatgtggttgctgggaattgaactcaggacctttggaagagcaggcagtgctcttaaccactgagccatctctccagccccatttcttgagtttttaaaacaaagctggtctctatggaggctatatatttatttacattggcaggatctaaacaggtgtggaagtcaagcaatgacagacatagatgaagaaaggtcaagggataccttgtggagatctctgatttatgcaaaggatggagaaggtgtaggatgcagactgttgcattcttttactacggtccaaagtactttggtcaagataggatggaaaatttatccctgtttttaaaacttacatttatcaaaattccccacccatctctattgcttactcaattgtttcctatttctttctttcttttttcttttgtcaatataacaacaactatattttagatttggtagaactgctatccctgtcctcaaagaattttttctagtgggtgtagtcatggatatgtttaggaaacatcatatagggctataaaatagcactcctaaaactaaggcattatagtaagggttccctggtggcatagaattggggggaaacaatagagataaaatcaagctttaaaattgcatgcagaaggaccttctggatgaagggaatagtaagtgcaaagatcctgaggtagaactatcactctgcccttcagtgctaatctttgcaatttaatgcataatagttgatcactgaacatttgtagaatgggcatgttgacccataatcagtgaaaataagtgtactttgtaaaagtagaaatattcagtattgctctgcattaggcagaatactcatgtttagaaaacaatcccatgaacccatccctgtgatgattaattttaaatgatgacttgccacaaccttgggaaataccttgaatgagggattgcctatatctggttgatctgtgcacatgtctgtgtggttttgtctttattattaactaatgtacaaagacccagcccattgtgaaaggcataattgcctaggcaggatgttctaaactgtacagaatagaggaaatctaaaagcaagaaagacagcatcatgagtgcatttttttctctctctcttcttaactatgggtgtgatgtgactagctgagtgggttcttcccgtggcttccctagaatggtaacctggaatcagaagctaaaagaagccatttctctgtaagttgttttgattacaatattttatcatagcagcagacatgaagctaaaacaatcccattttctgggtagtgaatcagctacagttctatgccataatgactgagaatttgtgttctagaaacaggttgagtagattgtagtaacagctttttcacttgctagctttgtggtcatttaacatttatcattggtgattgcatttattcatcagtaaaacacataaatgatatgtgaagttggtgtgaggctttcatggattaaccatggaaaatgctttaaatagtccatagcatagtatgctgtaggtctcctaagggcagtcatcatcattgtcaatcatcatgtaaaaagattggccacaagaaatggaaattgctgaagactgcagcaaagagctaccaagaaggggtctcaagatgagttttaaatgtaagggtagtccgaaaatggaaaaaaaattctccaaataatgtctgtgtttcgactgtcttaacattctttgacatatatatatatatatatatatatatatatatatatatatatagaaaaacatgtttatcgcatatccaattgctttaatagttattcccaaaatacttcaaggctttacatgagaagaaaattattattattttctgtctcataacacacaaaaataaattcagaccactttttcttttattggtgtaagataaaaactagaaaacaatttccaagcagatggtcaagttgaagaataggtgggtgatacttaagtttcatacccccttgaagatgcttggtttaattgtgtgaaagggctatggagtatgcttatttgtgtacacttctgttacacaatctgtaaatgaattatccatgtgacaacttcttttataaaagaaaaaatacaccttaaagtatcacctgagttgacatgaaggaagagaatggctcacttactttatgtgtttgaaatatcttcaacttttattcagcattattttctttggggacactaacagtgcctaggatctttacaacacatacaacattcacataaaaacaccattagtgcctggtaaatactatgattgtaatgggtaaagatacagttgctcagcgtaatttgaaaatcaagtatatttagtaaaaattgtgaaaagatgagatagttcaatgagtaaaatgcttcctgcgcaagcattagagactgagttcacatcaccaacattcacataaaagttaagcatgctgacacatgtctataactctgtcactggggaagacagaggcagagggatctcagagctcttttagccagtctagctaatatagagagctccaagttcagagagagatcctgtctcaaaaataaggtataacatacaagagaaagacacctagcatcaaccttaggcttctactcttgaacatatagtgcaagcgcgcgcacgcgcacacacacacacacacacacacacacacacacacacacacacacacacacgaataatgccttgaacataatattttattagtacatatcaaagaaagaaaggtaaaatagaagctcaatggtggaatgttcagctattatgttgaatttacaaattgacagtcatgtgactttgggcaagttttgtaacctgaataatatctcatcctcctcatcagtaaaatgtaattattttgaataaatgagataaaacagcatggtagaaatatatactcagatttttataaatatttttctaaacacagccataaaccataaacatagcctttaacttgaaagtggattctttattgagacatgcaagaaaatatcatcctggctgtcactctgtctcatttgacttggaacagacaatgctaaatgactcacctgatttctgaattagagaagatgcaccatcataaatgaatattgctttaagtacttaagctttgccagtctgtcacaaagcaatagatggctaatatgatgttggggtttgtgttttatagaatttacatgggtaaatatctacatagctgagtactttttttaaaagatgagatactagtatttataatgaaatgtcttttatttttataaatggttgatcatgtaacatatacattaatgtaattctaatggcagtataggaagtaacattatttgacaaatgcttattttaaggctgtttccattttaaaatttcctactacaaatacagtaagtcaagaaagacatcatggttttataatgtatatgcagttgttgtctaatgaccaaactttagaagtaggattaatgactaaaatatgttggctcacaaacatagctcaaatactatattgaagaataaattgagacagtaacacttagctttggatagcatataattcatttcattctttttctcgaggtgcatcactgaaacgagataaaagtaagctgacaagtactacatttttagtagttttcttccatctgcccatcctgaaaatggtttcttggtatcatatttagggttattattgctgcaacaaataccatgaccaaagtaactggggaagaaagacattatttgacttacatggtctgagtcaaagtctattgaggaagccaaggtagggactcaagccctacaggaacttggaggcagaagctatggagaggtgcttcttactggcttgatcctcattgcttgctcagcctgctttcttatagcatctagaaccactagccccagggtggcactgtccataatgggctgtgtctgcccatatcactaattaagaaaatgccctatagatcttgcctaaagcagaatcttacagaggcaatttctcagtggaggttccttccccttagatgactatagctagtgtcaagctgacctaaaactggccagaacacttgggataagacaaatcagttataatttgtcagttataacaaatctagtctagtcccctagactagagcagaggggaatcctgcatggagagaaagcaactatgcctagtacttgaacataaagtgagcatgattttggttttgtaaagtactgtctccagccaaatatggttctatgggtgtcaagtttaggcacacattgaaagacaaaacaatttcagcggggcagtatagattttaggtcctctgacttttagttcaggcatcttcaacatgatcattggaattacagaggagcctggcaaattgtgtcttcttacttctagagccatagtgccaagcatagtctctgggatggcatcctccaccatcaggacatcttcagacttgccctcactctgttctttctaaaaaagaagttgttgtggtctagctttgactatatgttgttcagggatttagcaaatagtactttcaggtatcaagataatttgcatttgtgcttgagaaaaattcccctgtggtataatatgttatatactgctgtgactgagaaagttattagatacataagtccagattttctttcattttattttccaccgacagggcttcctacactttcataaactcctttcggaggtccttagaagaatgaatttacttgtcacagaactatgcagactcttaagtaaaactcaagccctgtttcaccactgtgtttattccaagagcaggactgaagaggcccacatctggttgaaattatagaggatttaggtgggaagaatctgagccagtgaagtcattcaccttggaaataatctatgaaaactgattgcccattttagctatgatattactttccattctctactccctactttcatcctcccattaaatataaaacatgtttaaatttggaaacgacaacaaaaatagggactttggcttaaaatacatgataggagatgtgtctactatttcagcccacctttgctgttataaaaattccataaactgtagagtatataaacagatgtgtacttctccccaggtccccggtaatcaaggtgctgacatatctaccatctattgacatctcctttcagactgttggtgcctccttgcagtgtctttatgtggtgaaattggctgtttgtctagctgggctctgttttataaaagcagtaatccattcataacgtggctactttgtgattgagccatccctctaggctctactgcctagcctaatcccatcatgttacggaatttcaaacattagaatttggggaacgtaagtgctccattttacacactaaactatgacttattttattaaatacagttatataataaaagtctcctaagaaatcatatttgctgattaacttgcttaataggtttcatttcctcaaggaaaagataataccattgtagcatatttttcccttttaaatattttcttggggaacttatgctgtttctaaagtagaaattgtatttatgtaatagttttcgtgtgttgtatgtgatagattcctattaatattgtaattcattctgtaaatattctatttacaggttagggattgcatttttgatgaataaagcgatacactgagattttaaaaatctcattgccatgaaaattgctagctgaattagaaaattctatatttagcattcacagaacataaaagaggtactaaaatatagaaattgataaaagtttccatttctaagaaaaggatcagggaaactgcattcttcactctctgttagtttcttttacaacaaccaaaagaagcattcagaaggacgaggtttttgctttggcatatggctcctgagggctgactgtccaaagtgtaaagaagtcatggcagcagggacaggaagctgactgattgtttctcaaccacacacaggaagcagagagaacaagctggaagtaaaggaggctttcaacccataaagtccaccctctctgacatactttctccagcaacactgaacctcctaaatgtactataagttccccacttactggagaccaattaaatattcaaatattggggacaattcttattcaaaccaaattgattttggcataatataagacaatcacttaaaatacgttttttcttaggaaggaaaagttgatcacttgaattcagacagatttattatgatcaaaggcatgcagtaaagtttcacttcccattgttttaaaaaatacttccagctgtagattattgaatatctaatatttgtatctggaatttattgagccgttcaggatgtccttatcaatgaggagaagggctatgagttgaataatattttttttgttttgttttggtttcaagacttggtttctctgtgtaacagtcctggctgtcctggaaatcactctgtagaccaggctggccttgaactcacagagagcagagatcaacctgcctcctcctcccaagtgctaggattaaaattgtgcaccaccaccactgctcagtgaatgataatatttttctgtaaatctttggttatttgaatgattaaaataatacaattaattgacaccaacttgattagaactttagtctggatcaatacatgaacaatttcacagagaatcaatggagtattaatgaaatttgagaacattagaagtccaagggatttgtccataccttaaataatgaaacctatcttaacagaaataaatggtagaagaaaagtcttaatgaaagcacaatgtagtttttaacaagactgtgtatggagccagtaagatggcccagtgtttaaagggacttgttaccaaacctgtttggtgatctgtgttcactccctagaaactacatgatagaaagagagctgactctgcaagctgatttctaacctccatatacataggtatgcagcataggtaaaacacacacacacacacacacacacacacacacacacacacaattgcatggatgtggtggttaagagagtttgcagggagaggttgtctcctataccacataggtcttagggatcaagtccaaggtttcagatatttctgcaaggtcccttactgtggagccatttcacttaccaattttactgtaagttagctttgcttattggaagaagtctcatggcttccaggaatataataaatataaccttcctgaggacaaactcagaagtatctcacatgtctgatttatagctagttcccccaaactgctaagtgtttcatggcaagatactagaatttgattctacaagacaaaacggacctcttcagtggagggcatttcatatggagaaaggaacatgaaccaagagaagcatcacagtgttgctgtggatgaggtgtggcttccggggttaagtaaagcatccaaccaatgggacgtgaggggttagggaaatgacacagctgctgtgcctaggaatgaaatatgtgccttgaagactgtaacagtcgaattttctcatgggcattcctgagcagctctacgttagggccaccataatcctctgggaacattttccaggaactcttgaagcaggtggagagggtttctctaagccctgttgtggaacatagagacagccaatctcttgtgatttgccctgcaggctccaccatgcctggtgttgtgatcacacattctttggtccaaatgttagcaatccagacgtttgtgcatacagtttatgtctgggatattttttcagatgtttgaaggtctggagtagcgtgtttaacctacaagtactattattcttgtcttccttttgcaaacttcacttttcagtagaccagaatgctcagaacacatgtagaggctgggtatataggactagagacagaggctctactctgatccagctcccacactctcctagtctaagtggattcttccaaaaatgtgcctccataagtagctgcttaagacagtttaattggatgtcagcattttctgctgagttgatttgggaaactgccctttatgtatcattgtcccctactcatggttatgataattttcactggtgcttcatgtttaacaaaggctttcatttttaaaataacttctttccgtcagacagatgagagagagagagagagagagagagagagagagagagagagagagagagagagagagagagaacacagagagagatgaacagagagactgacagagatcctagcaatcttcagctgtggtccttaggcatgtggagcttcttagtgaagtcgctttcagttgccatttcgtaaactcatgaacttctctgctcagagccaagtaatcagtctcctctgttgctgtagtgatttgtaccttccttaaagtcctttgaggactcccattttatttatgaaaacactcccttcctagactaacaaggtcctacaggacctagattctgcttatgtttcttccattcttgtcttcagccctcatggagttggtactttgattccttagaactttcagtcttatgcctggaaattctgggatttgttttcctgccttttttctctagttactcatacactgaatggatttcagctcagtgagtatctcccccaagactcctaacctgaattagttttcctatatgaaaaggttattttaagcccacatatccctgacatgtttatactgattcattacagttttgccctattcttgccataatttagttaacatctttcctttttatcccaaagtggaaattatgtcattgtatcttagaataaatatctctggtataatgtcatgtcaaacactgaagaggtgtttcactcttacttgataagtgattgaatatgtcccactatatttaagcattgttgaaattcagtttcctgaaaaagagtcattggtcaattgttctcattttgaaactctgcattgcactctgctattccagaaatgtaagggctgttcattgcatgaagcctccctagagattagggaagttatgagacaaagtgtgtaagtggtaaagcttggagtaaaacaactttgatatcaaatccttgctctgctactctggttagtagccttagatcctctgaaatatatcttcaacttttaagatttagtttctattgggtaaatgaattcaatgtatttttcaggtatcccatttcagagattgtatgatgcctatcaaaactttaaatctaaatttagccaagggatatggcttacaagtattgtactataggggaagctatagccagcccctaagtaggcgtggctacagcttcccctacattgtacagtcagaattctgaagatattcattacagcgttattaatgatagtaaaaatctagtaactaaatgttcagaaagctggataaatgatacaactcttcaaggaaatataaccactaagaacagattaatttgatttggaaaattgatacaaagaaatgtattggttctggaaaatacaaatgatttggatgtggagaaatatccaatgtagtcaggaaaatggataaattttagaaggatgtgaaggaaaatatgccaagaccttgatactgagagcaagggcaccagtcctggtgggttgtctctgagcggaaggatgggtgacaggcatatgtctgaggaggggtggcatttgcttttcacataacacttcttcattattattcatgcttttatgaaaagcacaccacatttgtagccttaaaacacaatgattagaccagatcatttatgaaacaaactctgctttagtataagggcgccacatatcactttaaaggagagagacaatctgccaatgtgtttgagcagagttccagtcagacctcagttgcctgtgactgtttgccaggtgagaatttacttctaagtcctggtcaaatctatgatagttcaacaccagtcctccttcctggagtaagaaggaagacacaatgcctcagtcatatagaggtaaaaagtgactctggcaggtctaagattgcagatgacagcaagcacatttcaggttgaatgtttaaaagaaatgattttccagagagaagttaagccctggttgttttcttattaaagttacttaattttacaataaaatttaacacgagggaaagtaatgtgatgggcagacctggtcactaatgggctcttcagtgaagtctttccctataaaatgtacaactcctcctctgccgcttaacttaggtctcatttaattagaacattttaagtattgtttttattttcttaacctttagcatgtgtttgtgtgtgggggagagagagagacagagacagagagacagaggatttgctgtgacacatgcgtgaaggccagaggagtcagttctctccttccctcctggcactctggttatcaagcactgttgatctccagccttgtggcaagcacccttaaccactgagccatcttgctgcccccaaatacacctttaattataactaaccgttttctcctgagtcctttgatcacaatcttcccttgcacgtgagctgagcaaccactctgtttcaaattggaccttcttttgagttctatccacttagaatgtgtgtgtgtgtgtgtgtgtgtgtgtgtgtgtgtgtgtgtgtgtgtgttctttttctaatatactcctagatttgacattttcatcaaatgacctggtagctaatagtcactttaaagtgaaattttccatcacaagctaaaaatagcatttcttgtcacataattgtatttatcagagaacctggcaaaggcctagatttacttaaagcacattttatcttagtcaacactgtgaattttcatgtttttttgtggatgtcattgagtgccagccatgtttttactgcatctgttcttgatacagtaaacactcatacctttatagctgggcatgattccacaagctgacacactgccaagtggttttgattcagggcttttcacttggtgagtgaaaggtgataaagagaagttcacagcagaggtatggatacagaggagcaatttctagagccatgctcctgctgtaaactcctgtagagtaagcatccaggatgctaaaaggagaaaggaacaatttatgaggcaatgtgcttgcacagcacctctgtgcatcttttctagccaaacctagcatacagtcttttagtaagacacattattgacacagataggagtaattcagtagacagattggttgtgctgtaatgtactttactaggggaatggagatggcttctgaaggagcagcaggtgtttagggcaaaacaggatgagtggaatatagtgaaatatttgtgcatgtgtgtgtgagagagaggaagatggggtggggtgggagattcaaatgtttctgaatctgcagtatcacagcaaacatttcacactaggtgatttttttagtccatggcaattctcatttgaaaacctcaaagtcagtgatagcattgtgatctcactgtcctatgaaaccaaagacctgtgaaaataccttggtataaaaaacaaaaacaaaaaaaacccacaaaactttgaccaaaggatagtagtttctgaaacaccagatgctaacccaaaggaatctggatctcttgtttgaccttatactaaatgtgtttctatgtcttcttggccccacagcaatttctagaaaatccacatctcccgtggtttctaaaagtggcaatcccagaagaggcaaggtggcttaggggataaaaattcttctcactaatcctgatgacctgagtttgattcctgggtcccacacagtgaacagagtataccaactcctttaattttttttttttttgcaagtgacccatccccattcattgtcatgattcatttgatcggaggtgaatcactaatcaaagtgaactgcattgacccattcactgaaggacaatcaatccactgtttctcttggaaaggtgaagacagtaactctaagacttgagccatttatttactgaagaactcccaactgtgccatgatatggagaagagtctatgtaaatgactaagctgagcatgtgcaaagcaaacttgtatagacttggaaggagaaggcagagaatgtagagcagaattgagaaaaaaacttacaaggagtgtcctcggtttttgttttgttttgttttgtttctgaccatatgtcacatcgtatctatataataatactggtacctgggatgagttccttcttcccccaggccagaggagtcttcatgagggaatcctactttatagcatgaccctgcatgccttactgttattgggatctatttgtactttcaagtctgtactgtaagattattgttagaaaagtctctcataatccaaagacaggaggggcttcaggattagagtatgcaaaactagttgatatttcattatgggaattttactccagatggaatgttattaagacctaattctagagtgaaaatggaaatgttcatcaagttcttgaatatcagaaccagatggcctacaaggatgacatgatctgacaatccaggtaatggtggagaggataacctaaaagccattctttaaaacttaaaggattattttcattcatgtaagcagtccactttgccaatgagtagtgataaatggaatccttcattctgtgttttattgtttagtattcagataaagtcaaatgagagaaagtcattaaagattactgctataaattaggggggggggacttgaaaaatattcctacatttttagttgtgagctttggaaaggaatttgctaccttttgaaaacagcccctggtattctctgagagacagttttgtttcttacatggaggcatggactgtgacttgcaccctcactctcagataactcattactttcttaggaaaatagtcccctggaattcagagaatggatgctgaagattgggaatgtgtcttctatttttaccaaggtcaaaactgaggtacatgtttttccagatgatcaggaaccatttcttgttgggaacctaaagctagagcctgtaggatatctttattcagataaatactagccaaacgcaagccagagcatgcccagggcagcaaggcagcgaggccagagagaaggggtctcccatgggctcatcgtcccttaagagcccatcacacgtcatcctgacctcaccttgaccacgccttcacaggcgtggtcaggcatacctgtagccagcctctaacaggcatggcttactgtcccctacaggaacctgttcagtgccagatcttcccatgggactctgcccagcaacatggggtgaaataagttctgtagcttttcaaggtctctgtgcactacattgtatgtctggatgcatcaaaagccatcaatgcactctccgaccatcacaattccaggtgatggtggagtatatttattgtctctggcgacgcccacccccccagtcttcctgacttagagaaacacttctggttatagttcagaccacactttcccatttactaaagactcctctcacctgatgatgttctggacttttccacccaagtggcactaacagaaatgacctaatattttcttcgtaaaaggagacagcatgacactttcaaaaatctatcttcccatattaaattgtttagagaatcaaatacatagattcatttaaggaaaaattagaaaaataagaagcagtcccagcatggctaactgggttgatcttgaacttcatctaaccaaagcacacccatctctgcctcactgatacacatctttattttggcatttattctaccaattaaacataatataatctattttattatgtcaaaaacaaagagaaacagccaaaatcaagggggaaaagccttctccttagaaataaaccagtaaaattctgcaatcttccttttgctaaccttttccgcagttggaacttagccaaaaaatgacgttaaagtttcatttctgaataggaaaggaacaaaattaaaaggctttcactcaaactaaagcatcacagaaaaatcaaattatgctctttgccaaactgatgatcaaatccatttgactcactgcttttctctcattttctcgatgtgaatagacacattctacttaaccaggagtgtatgctcttctgaaaggagagtagacatcagtgctatatttgagtttcctgttctacaagaatcagaacatgacctggatatgacatatataccagttctaactggtggtcagaagatgttagagagtagcacatcctttctgggagcaatatatcatgcaagaagccagtgttgcctcatgaaagaatgtaaaactgtcaagccactggttaaatagtcttgggcattgactgttacttactggggtatcactaagagaacaaatttgattgcttacttattttgtttgtttgtttttcgagatagggtttctctgtgtagctttggagcctatcctggcatttgctctggagaccaagctggccttgaactcacagagatccgcctgcctctgcctctcaagtgctgggattaaaggtgtgtgccaccaatgcccagctgcttactttttttaaaaaaaacagatttaatccactttatttttcttgcataaaaactcttatgtggtgaccatagctggaacctgggtcctctgaacagagacactggtgtgagtttttacaagatggtcagtaaattcctgataaggcgatttggtgaatacattgtctttccagaggtcaggggtcagatagttataggtcttaagaggtggccttggcaaagttgcaagggtagcagtgcagcccctggctgatatgtagcaggctcccctgctgcattggtgacatcctccatttggtgtttttctgaagtagaagtgattgcttgcttttaccttttaatattaaattttcttatcttcgtctttttgggacatcagggctgatttttctgccatgaaataatgtatggggctcacttaagcttaaaacacgatcagacataatttgttctaagtccctcactgttttgtcgattagaaacaacttcccttccttgaaaacacaattgccatgatacacataatttcttaggttgccatctgtttttacaaggaatgctttcagttttcctcatgtcatgccctgggggtggatttcataatgatccacagctagagccattcctccaccaggtttattccaaacctttaggatcaccttacttttatttctagatttatttaattttgaggttataatttaattacatttctcttatccctttcctccctcttaatcctctcctataacccttccaccactacttcaaattcatggccgcctcccgccaattgttattacatgcatttatgtatagggggtaaatacagaagtgggtgggaagcaggccaaggggggaccgcaggatgcaaatgatttgataggggaaaatggaagcaggggaggtaaatacagaaataggggcatgggcaaagtaacaatcaggatgtctagaaaagctacaaggaatcatgctgtcaactaatttcctaaaagtagaacctcttatgaatataattttgtgtggagatatagaaatagaattttaatgaactttttcatgtgggctgatgatgcttcctctaaaagccaaagagaagactagctaacaaaagtccctcctttgaattgttggtagggctgtctaagagactcccaagaggtggaaagtaagtcagcattgttgaagataggaacttcagaatcaaggcccagagacgactgagcgggaactgagcagaatatccctccctgaggattagctttcatgggactggaaagtttgatggaagcttctataggaaggaggcaaccaacagtgctacccagctatgagacctatgaaccatgtcaatgactagcatggcacaataactctaagggtgcagcagtggcacacatgccttggtggtaaccaagagccatctgattggacttaagacccactcaacaagagggatagggatactatgactggtactgatcacctaactaattactcagttctagctaaatcatagttgttgaaggagaatccataattactaacttactaaattagcattaatccttaacagaagtctacaaacacgtgtctttatattcaaaaatagatgttttctttacccccataaaagatattatgtgaaacagatggagaccactagagaataccacaaccagtcaaaatgtgcccactctcaatctacaaacactactgcacctaaggctcgggaaacactgtgggaaaggaggcagaaagcttgtaagatccagaggatcagagagtttcctgtggtatcctttctcctaatagtatcagaagatatactcataaagtcctacaaacataactggcccaatgtgagttgaataaggatgtcacaaatgaacataccatagtggacaagaaaaccctacacaaccacccaaccctacacaaagaactataggcaatgggggaaaactgagaatgttcaaggtgagcatccccagggaagagcacaccaacgggttgtcaatgtcaaatgatcatccctagaaacaaacatacaaatgacagtatccagagggttatgatgacttttatatttaaaaagttaaaaaacaaaaactccagaacctgaattttctacttcaacttttagaaaatagaaaatggaattttagggggaaaatgtaaaatttccaataaaataagtaacaaggaaacataaaactgaaaatgagaaaaaaatttcagcaaaaatgtctatcatcaaaatgttaaagattgaagtattaagaaggttagaaaacacaagaatcagttttaaaataatgccattaaactgttaaaaggagagggaaacaattatagttctaacaacttgatagagtggacatttgcagatattcttacttctcaatgtcagctgtcctcaagtatgaggacatcagagtctccaggagaacttatccaaggaggttggttgccctgtccatggagtttccagtgtagtggttctaggctgggactaagaatctgcatatctggcaagatcccaggtgccactggtgcaccttgagagccaccattgtacaaataagagcagttgctcctagagtcagaccacacaaggtgactttaggtttattttcttcatctgtataataaggataattccccaggtggctatctcataaacaggagaacaccctgtaaccaataaaagtaataaccactaatttctttagaactacagcctgttgtgcttatgtttcaaatgtaaaaatattgtctctggtgatgtttgttgccaatatttgccatccatggtatcatgtttttcccaactccctgtgaacttggacgtaagaaggctagcttacattttgcattcaaatatgagctgtagtatagatgttaatgtatcctaaaaaatattccttctagttctgtgtgattccagaacaaagcattccattaatttacctattcctgaagcctttaaataattttttttactgtactgacataccatgcttttattatatattatcagataattgtttgctcctcattttcatattggggtatcctcagggtctgtgacaactgtaatatttgtgcagaagcaatgcttgaatgtgtacagtgcaccaaacacaaggctctaagtttgcatgcttaggaagcacatagattttctggggtgtcatagcagtctgtttccagggggaccttaagcacattaacatacctagaggggcctaacacttgggcagagctaaatgtttttgtgattcaccaacactgaaacagatagaatgaaattagtagattgagggagaatgaactgtgccctgtggaaaagaaacatcaatacattttccagggaagtgcataatgggttggctggcacacatgctccatgcaggatgacctgagagcaaaaaagagcacacacacacacacacacacacacacacacacacacacacacacacacacacaccctgctcagtctgtgtaatattatttgtatgtatataatttcagggatgactacttgatgtttgttaaacaattaaagaaattactcatcattaagtgtgtagattgctcttcatttttcatttgtaaggattgttatagccacttttcaaacttccactgatgaagttagaagcatgttttttttttttcaccacagcttagaaaatatatattcacttatagataataataataataagatgttgatcatgaattcatttattttatgaatttttcaagtatctttttcatttgttgtgtttagacctaatggtcaatgataagataaaaagaaaagtagtgagcttaagataattagtgagaaaccacctaaaaagatttataattataacaactaaagggtaaatagttttagaaaatggctgagattttagcaaacaaggagtattagaaaatgtgtatgggcagctgctctgtagaaaccaattaaaatagaatttcttttctgtgctgaatctcagcttacacccctttctacccttgcaacaagatactgcttcttaaatagcatctgtaacccagaaaccaggagtaaataatagaaatattgggacatatgaaaacaatgttgcagtgagccagattgtgtgaggtttttttaaaaaaatgagactagcaggggacaaatttcaacaccctaaatagcacactaacacatatatctaaaagttcaaagtggggcttcccagagaatgttttacaagagcctgtagaaggttatccaaagcatgctgagccaaactgctagaagatgcattaggcattttgtttttgcacatttggataatgtgtgaaattatttccaagtttaaaaatatctttacaccttcctctgtgctaggagtgaggacagatttttgattccattttatgcagactggacaaatctatggtagagacaagaggatctgggagtgattcttatacatgatttcaaagtctctgtggtgagatgggctttctgcttgaataggctgcagactggttaaaggaactgttgagagcccaaaccagaccaacctaggtttgcattcttcatgcttttctgatggtataaccccaagcaggtcgtttaatgtctgggagactcgattcaacctttctaaaatacagaggtagtagccacctttcaggaccagaatgggagccaacccagtaattcttgcaaggtattaacatgattcctggcatatagaaaccttcagtaaatattgttagtgactggagaaggaagtgcagaattttccttgtgtgtggcccacagaaagaacccctagcttttcacatctgaacagcagctatttcaggtgtaatcacagattttcttaaagagcaaagattctcatttctctggcacattttagggctttaatggattccgttgactaactgattttattaattagaaaaaatcttaacactacctttttccactttagctcatgtgtccaatgctcaagaatatcccttggttcttgactgcctcctttgagaaacccagttcatccaggctcagttgcactctcctctaagcattcagggtttcttagactcatacctttatgaaattctttctcagtcagttttccattgtttgttttttttttcagcttgttactaattttacaaggtcaatgacaaacctctccccctttctctagctttattacctcatagttttacatactctaaatgagtttcatctatctgtgttttctccatactattttatatgttgttctcatcagtagctcccgaagtcaatagctctcttttgagtcttggtgcttcttcagtggctaagaccaagttctcacatgttgattattttgtacttatgagtttaattgagaaaaaaaaaaaacattgaataagacaaagcaatgcagggccctctactatctaaggcatattgttctgcacccagcagagacaatccctgtatagcatgattaagaaactgactgggctggttgtcttttgctctatgtctaatatccacttatgagtgaatttatgccatgtttttcattgtgtgtctgggttacctcagtcaggatggtttattctatttttatatatttcaatatttcattggtgatttttttctgtttagtactacaatctataaccccagagaaactaagaaacaaggagaacctaagagagacatacatggacccccaagaatgggaaagggacaagatctcctgagtaaattaggagcatgggaggaggggaggacaggagggagagggaactgggattggtagattgttttaatttaaataaaaattaattcaataaaaagaaactgaccagatagtcagttgaattagatcccctttcaaaggaacaaaaggttgggatcgccaatgtgcagacttccacaatctggaccagattagaccaactttggggttttagaactccaatgattttgttctaacatagtaataaaagcctcaattcttctgtgtctgtcctatcagaattctcccatctatgatatcttttcattctatagttatgtaagtcttgctacattgactgagaatcgcccacaactacttactggcctagtcgctttacgggagtccattattttaaccctcataacacaacctcatgatgtggatccaaaataaatgctatcatacaggtgaagcattgatgttcagacacattgagttcaagttcccatagctgacaagaatttgaacctgaatctacaggagcactatgctccttgctcatcatataagctaagttgttgatcatccctaccccccgggggggaggggactctactccagaattgtggccagagcataagtaacctgtgaggctcatgataatttacttcaaccctaaaaaagacttcctttagctacttgctattttcataaaactttgactatggcactgaaagatatgtatgcaaacatgaactcatacaattttagaggaaaaatactcacatactttgggaggaggaaaccaaattctgggaggtaggtaccttgctctatctgtgaactagtgccagacctggagacagaacctgctctctttgaatgcagcaccaatgcctcactcagcaggaatcatctctgctgattagccttgcaaatccaaacctgtaaagccacaaggaatgtcagaattcatgtaacagatgttgttttaggttgcaattgttgtcacttactcttaatgccagatcccttttttaaaaaatctctagagcctaaatgacaacctgtggaacttctggtgatgagagaggaattttccttttcattgccccatcctcaaattgtgttcaggaaacatcccttagcagccaactatccagtaaatagcagccagtttcaaagatggtgtacttgtgtaagctgtgttcacattcccagatcttcaaattctccattattatttcatctccactggtaaagaatgaggtttttgtcctctgtgaaaataggagtcagtggctaatctagcagtgtggcctgaaacaaaaagaatgctgaatcaattggaaactagctcaacacaaatccaaatagactaatagttacgagttgtggtgaggaaagcaagggaaactgtcctgtggatagtataagaagttttcttatgtgtgttcagagggataaggattggagattggaaagagctgaataaggaagcacaaaggtcagaggccaggaggaaaaatgccaaaggcttaagatgctgaagatgagacaagcttcataacactgcttagagcaaggaggtgaagggatggctccagtttttgacccctcagggaagacagcatacattgtcttctctagcacacgatagcctctttttaaagcaaacattagagtggatacgatgtaatactagagaataactgaaatcttcaagacatgagtaaatttcaaaacaccgctctggtgctttaagttaaattcagcaatctgttattgcaaatttggtcacactgacattttgccagatgccagcaatgactgggatgctgtaatgaagataggatacctgctctcaaaggttcatagtctaagggtaagccaggaataaatgcagcaccatgttgttatctataaattcatagaaatattaacaaagggagagacctagataatcataattgcaaagttattgatttcatttgaaacaagaagctcaattgtctagtttctatgcaaacggagatggtgatatgatgttaaccatgattaagaatccactagaggtttaaagagaaatcaggcactagggaaatctctggagatctacaaagatgacttcaactaacaatctaagcaacagaggcaaccttaaatgccctcccctgataatgagattgatgactgacttatatgccatcctatagccttcatccagcagctggtggaagtagaagcagacacccatagctaatcactgaactgaactggaatccagttgcagagaaggaggagtgatgaccaaaggcgccaagaccagactggtgaaacccacagaaataaatggctgacctgaacaacggggagctcttggtccccagactgatagctgggaaaccagcatgggactgatccagatcccagaaacctgggtgtcatcgaggaggcctcagaaatcatggggccttctgtaatagattagtacttatccatagcataggtgtggactttgggagcccattccatatagagggctactccctgagccaagacacatgggggtgggcctaggccctatcccaaaggatatgacagactctgaagaccccctatggaaggcctcactctccctgaggagcagaaagggtatgggataggtagggttttagttagggaggtagtaggggaggatgggagggagagggaactgggattgacatgtaaaacaatcttgtttctaattcaaataaaatatggaaaaacaacaacaacaacaacaacaaagaatctcaactcaattaaggaaaaaatagctaatcctactgtaaattcaagatgttcagtgagaaccatcatgggttcactaagaacaattaggctaaagtgattccatttcctttttggaaaggtaaatgtgatttgtaggctaccaatgcaggataaacatacataacctagcctgcatcttgcattccagatttatgcatttgactagatctgcaatgaccagttgtgaacaagaaatatgagtagtaagataatatagagagacaaacttgggaatactgatcacttggcatagcaaaagtagagatatctgttagtggcctgtaggacccttggccttggtgtagctatgacaagcatttcattcattcagatgatagatatatctgctggatacctcacagtaagcaggtagaagacataagcaaggaaactggagtgagttcaagggactgtttatatgttggagacatttgtaaaaaaaagaaaaacaaaaacaaaaacaaaaacaagcagtaacacagtctcagtgctagtccctagctctggcctccaaatagtggtaaaacagagggaaaaaaaatcacccactgaagcaattgtggagccacaggtgtgaggagacagtctaaaccgctaacatttgaagtcaactaatgttactagcattggtttgtttgaatctgtctgtttgtctgtgtcccagtttgtctacagggacctacctatcctccatgtccttctctggttgcctgtgcagaaactggtcactgttttcatatcttaacaccaggtaatttcctgcctttgagatagtgcttttgatgacccccattagcactttgctgatatactatgatcatggcatatgccattggctccttcttgttcttttgtgtgtaattggctccttcttgttcttatatgtataagactcatcacacacacatatgactgagaaaatatatgttcctgggactaggaaaaaatggtcatgacaggaaagagggctaagaagtgctgtctttacaatatagcacatccattgcaaatatgatttcatatcagttaaagtggagtgcactgggcctatgcaagactggacttgtcaacatccaaacctttatcaaaaacagggctcaatggtcccatacatctctgctcaactaatggctcttgatgggttatgggggaaaggcagtcattgtcttcattgcatacaaaattttgaggctagcagacagcagtggatatttccaaactcacagtcacacagaaggtctttattaaaattggtgggtaataaaacaaaattgacaaaatgtgtgaaagggactcttggagggagctggcagctgaggtgaggtaggaagaggtaagagtgtgtgtgtgggagtaaacagagttatgtgcatgtaagaaaccatcagaggacagttcaatcaaaatgaaaaagaatgggcttagaggtgctgattgattgataggtgtctatggttttccacctcctagtaagccacaaagggaagagagaaatgtatctgaacatgctgaactctacattacactcatcttcttggtaaattttagaatattttatttctgctatgtaagtaaagaaagttctggatatggtgtagtcattcctaaacatagttttcttcatgtttgaattttgtctggtttctgtttttttttttccttcagaaccaataatctttctcttgctctactcttcaaatgacctctgttttttgagagcaaaccaacacacggcaggaagaaaattgcaacacagacatttttaaaacacaccatagctatttcatacagcaagtcacacctgtggggctaatcaagtcttgttggtgagatggtgagatggtcaatgtctttggtatgagactgaagcttagaaaaccaagcatttgatttgatttaggaactcccccccccacatactgtcaaggtgaatcctggacaaggtttgctgcaggtagcctgactttgaacatcatttctgagttcattctctgttccaggggatatggaaaacagatggtacaacatagagagtcgaatatccatccttcctctaccgaagactcctgctgtggggtctctatttcaaatagtctaaacagcctgtaacagggttctttactgtgaaatgccctaaaagagccttgagcaaataaaacaataaagtttctgtattctttcattcacttgaatgcttatttttctattgctgtaaaatgtaccttattttttagtccatgtataatgtatttttctgaagataacagatgatgctgataccttttgtaaatatattggattggtaatattttttcttattatgctgcagttttatgagaactcatgcaggctacttcaggttaccttatcatctttggctacaactgagactgcatctttctcagctgctaacttcacagtgtgttttcctttatgaagcctgggccactgaacataccactttagcctgctcccattcctccccctgccagtcagtcaagcataacaccaagaggtgattagaatgtctgtgcccctgcttcatagaccttcagctcttcctgtctctgtcctccctttgcttagcaacaggatatgtcaggcatggtgttgccaggagatttctttcttcctcccatactgagaggaagaactcaaggatatcagacatctcatcaaacttcacacattttactgaattcaaattttggcctctgaataccagggccctgtactggccataggattgtcacacatgatctctgattgaaatggacttaatcttctaacagtgcaggcccttgttgctcagtgaatggagcaggatgtcaggatccagggagatgccaatacatctttcaacaggatctctgtcctcttttcttccccccaggtactatttttaaaatttaagtcatctaggtcaggaattaaggccatctttgccatggtagttaaaaggatttctgagacatgcacagtgtcttcctcactctgctaatgctgagtgttttgtgacatttactgagttgattgagcaattgctgggtttctcctttggatgaattgttagatgcctggtgagtaccaagaagaataagacagagtccttgctttaaggagtatagcagacatgtttatttgtataataggaaacattccatcttgcaaatattcacacttttttatacctaaaagtgatttcatgtgatataacttaataaatgttctcattggaataagggaacaccaagcccaaagatctgaactgtagcttcatggaactggggatgatttctataggtaatttgtgatctatataaggccttgctaggtagataaagatttttctgtaacatttttatgttatagagagctataagtttaatcacaggaagcagaaacatttaaaaaaagtagcaaacaggaatgtagcgagtacttggtcaatgaaatacttgccttgcaaacacagggacttattatttattcccaggaacaaacaaaaataaataaagtccaacatcgtgttgtatatttgttgtgcctcttgtttggcagatagagacaggaagatgcccagtgctccctgttgagccagaatatcctaatctgttaacttcaggccagggaaagatcctgtcctaagaaacaagtgctggagagatgatacctcagtggttaagagtgtttgctgctctcccaaagacagagagctcatgtttcagcagccatgtcagatgacacactgccacctgtaactccagttccaggggatgtaaaggatgtgttaccatcttctggtcccaataggcacctgcatagcacccacacccacacccccacacacacaaataaaggaaaaaggtgaactttgcctgggatacctgatgttaactcttgcttctactaggacaaaggtttacatgaacctccacacatatatgcaccccacgtcaatatatacatatacacacactgagacacacacaaaagaaaataacaaagtcatgcatgattatagcaaatactttctgaggtgaacagaagaggacaaatatagatatgtcagtagtttggtgagacagcgcatcaagttgtcagtcagtagggaaacatggaagatgctgataaagtgggtaacaaattcatggccatccgtcctgtttcactatgcttgaggctatcctgtgctgctttccaagatgggctgaccttcctgggccagataactaatagaaaaccccacattgtcttttaatatctgttggagcaaatgattctaacaaaggggttcaagatgagatggaaaaacaagcaacagcaagaacaaaatgttgaattaatagaaattgaagctggaaaagaattgggagtgagcatgaaatattcatatgacttcgttggggtttcagctcagagatgagacctgagttgggttcccagcaccaaaaaaagaaagaaaatgcacttatttttccaacatggtgtggaaataaggacaaaatatgaagaagtggacctggatggtgtaacactgggagatgggctggactggggccacagtttttaatctttgctttattctacactgtgttgcaaaaacaaagtgagtagtctacattctggcagcatagccaccaaagcctaaactatttactgtctgctcctttccaggaaaaaaaaaagtttgctaacaattgcaggagagtgaaatggcttgattaatctttcacttatcaactctcctgagacatgctggcacaaagatgatttttcaaaaatacatcagtcatgcaacctttgcaaataatgtctactgctggagttggcctcagagtcaggtgtcactagaagagcccgagctgtgatgagtggctaagctttggctcactgctattcttatccactcttagacactcctgattgtcctgcagccagatttatttttcagaaaagtgtgaatattggaatatttatggagcatctacttttaaaatattaactattaatgcaataaaaacctataaatctttgggccccaaaccatacttttcttgtctggtgtcttttcatgattatgcctttttggattgtggctttgagactatgaatccaaaacaatgatgctttgggggggataggatgcatgagagaatggggctgcagtgaaacctgtgagttgtacataaccagtgaagttgtaaatgagggctgagttccagaaagtaagatgaaagccacatacttatttctcctttcacatttgctttaaagcacattaaattttttttgtgcattgtgaagtgattcagatacactgacagttgttatcacagttctgtgtttattggaccaatttcccccctttaccatcagatgctattcaaatatgcaagaaggagaaggaattaattttatatctggaacataagtgtctaaatccgaataaaggaaaataaaaatgtatgagagcagatatttccttggttctgttatgtcaggggaaggaacaatccaagggaaaatccagagccaactatttcaacaagatgttaggcttagataaatatacaatgaactccgtatgtttgacaattgaatacacacaatgaaacttgttaccttttcacctaatcactcaaaagacaagaccttgatgaatttgtttaacacagtgcatcccccatggtagactcatagcatgtgggatgaataacccatgaatgctgcaagagccccgcagaagctctagagtgtatctctcacagctctgatttctgtcctctattccagcattgatggccgccttctctacctcttttgtctctttcctttgaaagtctcttcttgcttttagtacaaaattcgactgtactattacatttgacaaaaccacttgctaacttacctcctttattcatgcacaaagtttgctagcaccacattagcttccatttgtggctgaatgcacctatttctataaagtgaattatcatctttattaacaagtagcatcggaatgaatatgtcatccattttccttggttgacatgctaagtcaaaataaactcccttaagtaggggatatcaatatttctcactccctgatggggatgctggagagacagcaattctatgattggaatctacaaaaagaaaatgggggaatgatgggactagctccccatttcggcagccatgacagcctaacatgtacttgcctgaccttgccttggtcactaggaggtcaaatgcctgccttgtggcagggaaccaatcagaagttagctggtagtgctatactttacggctctgggtgtgctttacggactagtgcacagcaatgacacacagagcttagcaactgccctgggagggcttatgggccataacaaccagttgaccaatcaacacagggcaaaccctccaagcctggaggcacgccaatcctgagcctgtgtgtacccctagacactcccttacgctgccctataagatctctatgctgtggcttcgaggtgtctttcctagccatctgccatggtggatgaatgaaaggcctgagctaacatggggttagctcgttaaacaactgctataaagcctcttgctgtttgaatcaaaaaaggaaaaaaagaaaaaaacaatatcaacaataataataacaatcatctaataaagctttacatgtgctcttccaatatctctcagaagtgagattcagtcattctgtcaactgtcaaaagctaagctaaattacctaactttcaataatttgtccaaaacttgttcttgggctctcccacacagttgttgatccatacaatgtacccaaaaattactaggctcatgttcaacataatgtcagaaaatattgaatattcacaacctagatctcaccaagacaagacctatattaaaatcttagtttcttttaagttttatttcaagtacagatcaaaatgttggtaatacctatcttggaagtgagtgatttgcataccattgttcttattttatgcctgtgattcacacatggtcaatgcatcctcagttgaatattacactctggcttccaatttcatctgagctaagtgcatcagcagttgcagaaaagaggtgtacagtaaaatcagatagatataatcacagtatattggatgtgaaagtaactgattgaatacatctagttcatggtctttcattttccttgtgagcaaactatgactgcctgcatgaactctatggtaaaccttgtttacatgcatttatttgaaggaatgccagtttctagagtgtgacttaaagttgtctgtctaagattatgaagtgtgttaagattatgaagtgtggtccagcacaataacttctttttgcagagaattcataaagaatcatgagtaattatcacaactagggaagtgcattattaaataatagtaaattaaatctgttttcttacttgaaagcccctcctgtgttctctgaagaggtagctattaattggtctgagggactggtaattgactaatgaagacacagatctgattaaatacaaatgcctctaattaaaatactatctggctctaaggagtttaaagtaatagaaggtataatgcaaattgattatttattacattaaaaatgaattttttaaattttaaagtggagaggtaggcagatcatgccatctttaaaatatcaatcttgcttaattcatatgttaaaatgattctttaaaagaaataatggtcaaaattttagtaccccaaaatgaaatataactttggaaaatagtttataaaaattcacatggaaactttttgtaagctgtaaatgtttgattggaatattagataggcaataatatataatgctgcctatattgtggcttatacttgaatattaacttgagaagttttgtatcatacatttttggaatatttccaaaaatgttatggtaatattttttaaatatatagcaaacacgaacctgcaaagtttcatttcatattattagttataaatgcacatgcttatctcctacttttctggtaattcaaagtagattttaatttaattactgaattttagtctgatagatttctaggtaacacttatgtctccgatggtgtttggcccaggttttaagcttttacttacaatacaactgaatttccactaataaaggggataataaaataggtgaaaacctggatgtttattacaatactgtagtcacaagtgtccatattctttaaattgttactttgaaagaaggcttttattcactcattcaatatcggagattgtctgctgtccatgagttgctgtccaagtgctttgatagacaagttagcctgttgtgtactcctacagttgtgaggcttctgctctggtggcttggcacacttatcatctttgaattccaagtggcaaatttattattatggacttcaaaatgacatatttgcttaagtgatcttaggagcataagtaacaccttatgttggataatgctttggatctttatacatttatttgaataattcagaaccccttggagaacttcatttttctgaggatgaaactaacattgggaaggttttctagcattcacggatttacacacagtaaatgatgtaagtaaggttatacaggaatgcctgacttcctccccctcctacgctgtacagcaatttggcagaaggccaacttattcattatgttttggaaagtgggacagcacctaaacatatttgtgtgtgtgtgagtatgtgtgtgtgtgttctgaaagggtggacatgaacatttgataatataaaaagacttttgagtaatgtgagtgaaagagatagggggaaactaatatttagcattgtgtcagtttgaggcaattccagttgggcaattcacagggctaggagggaatgagtgcctgaaaccagattgacctgctggtctaagagtaagttagccatgggaaagggtgatggagtgacctgtcagggaaaggccagggcctttcatggagactggtggctccccgaaagcaggcttaggcattgatggatggctctgtcaggtgtgttttctttcttgaagtgcaatgtctccctgtttactccaggaagcaaggaatttagttaggattttcttttttaagcagctaggggtacactgccccttctctctagaaatctgtatattgctcagcatagataaacactctgcatcatatgtctgatgagttgctgccagactctgatgaaacagaaacacagtgctataggacctgtggatgggaagcacaccttttgtgggagactctcaaacccatatattttattaaatgaagagctgtgagaaggggaggggtgatagaatgagaagtgagatcatgatgtgtgcaaggatctacttccccacaactcccagtgctatccctctggcttggagttattgctagccagttctatagatgagaaagctgaagttttgaatgggttcctagccagaatatttattagtgttccaccttgtttttatgttactgaaattgaccattgatccttctctagagacagagttacctttgtcaaatactttaatgacaatgttttaaacgggggggggcagtttatgactgtttgtctggtacacaagaactcatgtgctgcaggttgtatgtgattctcatagtgtcaatcacacagtagatgacagctcaagatctgttgtgtagaactggctttggcagtctaagggtagactatagtatgtgctttccatgccttggcatagggcgtgttttgtttccttttaaggctgacaggacaactgtctaccaattggccagaatatctgaaaattgtttctttggagtggcagagtcaagccttggcaggaagttgttgattgctctttctctactagatgcaaattcttttaaaagcatttcagcagctgtgacccatttgtggccctgggttggtgtaaaagagaatatacaccacttgtgtgtgcctatcgatttagttcggtctggtccagctgagggtacttgccaagtgcccagcagaagtgcacagtgctgctttatgttacacattctaattctaaaagttataatccaggtcatcaaggatcttcatccactgctggtggatttcactttgcaaacactgtttctgaaagttttccacatgtcagagagttgcatacgttcacagtaatctgtggcagtgtaggaaagtatagaaaccatgagaatactctccaatttgtggaagagcagcattgtgttttaacagtaaaattaaatgaaacacaatatactgaatatgtgaaggcaggcctgccacttcacctcttcagatcaccattttctaaaaaggaaggatgagctcactaaatattaccagaggttagaaagatgcagaacagctgaacatggtggcacacacctttaatcctaggattccagaggcaagtggatctctgtgagttcatggccagcctggtctacaaagtgagttccagaacagccacaaaagagaacaggagagaagagaataagagagggaggagaggagaaaaagaaaaaagaaaagactagaaaaggttaggttccaaccatgaacacttactccttgtgaatttggtgttcttctggagtcccaaagcaaccattttataatgtaagcctgactttgttagattaccaagtttcccttccctgcttgtatttgtaatggataagagaattttattttttctctctctcaatagacctctctttttgctgcaaggtgccctgtctgattttaagatcaaaggattttatttaacctctaagttggatgttacatttcattcatctccaagccaattatgtgcaaattctactttctgaacctgatcagtaggatgcggagaagtcaggttagtggagattctgtctgctgcattgtactccgtgttcactttgaagcactggaaccattgcttctactcactgacatcagaaggcagaggtgaccagcacactgatgttcatactggcatggaaggactttagagttttgcatccctttaatctttgtaaatgaaaaatgtatcatgtcaaagggatggaagatttcatgttattatgcatcaaagatttgcagacattttcttcttaaaaggaatccgtgatatcaatagtcacacattgtttctgtgttgctacaaatcaaagaagctcagaaggaatcttgtaccgtgtttctgaaatgacagcacaatccacaaactgtctgtctatcagtggttctcaacttgtgggttatgactctttgggggttgaatgactctttcttatgggcttgcatgtgagatactctacatatcagatatttacattatgactgataatagtagctaactacatttatgaagtagcaataaaacaactttaaggttgggagtcaccacaagagaagaaactgtgttaaagggttacagcattagaaaggttgaaaactgatttagcctataaaaagtacattttttatttttttaattctctaagaacttatacattgcagtttgatcatattcatatatacacagcctttatgtttatgtgagtggcagttacaaacaagatcacactatgtattttatgtgtaataagtctatgatattatttgagaactttaagtaatatattcattttttcaagtgccaaacacttatacaatatatttagataacaaacatccaccattatactacttgagtttgaatgaatcattcactaaaattatgaggttgaagaagaaattccgtttttttccaagggcttatttttattctcaagtttatatattgtaacaaaatactctgatggaagcttaggtgctttttcattttgctacctccaaagtattctaatttacatgtctcactcataatggtatataatccacatgtttttgtaggttattgtataattacttttgggcattaattgatagttacaaaagatgctattgaactatagactaaaattcttagtctgaacctcaccttcctactgaggaccaaactgacaattctaatcaagcttttacctggaaattcattaacagaaaacaagccaacctgaaaaggttctataatcatccagtcaaaaaacagtaacaatatcatgtattgcagcaaaaagctgtgcaatataaacttaattaattcagtgtctttccttagagaatttggatttatgcttaattgaattaaagtacctgattatcctaggataagctgatttgtatccttaatgattttagatattgtataaagggagaaaacaaataaatcattatttatttcattagactgaaaatataattaaagaagtgagttgggtggaaagctggggttttcatggaaaccagactcttgtattacctaagtgacgagaaacagtcaaaatatagatcaacagagtgttctctgacctaaattaataacagcaaggacaatggattctgttccttttgaccatggatggaaatataattcaggaagaatgatcaaaggaatggcattgatttgtttggtagaaatgcattatttccatacatgtaactaggttacagttttaaaataacattatataacatagttttttagtaaagtggggatcttgatctgtgccctaatgctttatttccagtttaaacatgaccagtgttaggtataaacaaggataataccttatatgattgtatagattttgcttgtacatattatcacagaattcaacttttacatatgcattgactatgaaagagttgggaattaatgagttcactggaacacttgacaaatagtaatctaaatttccaagattaagcaactgattacatggttcatatttatctactaaaagacagcacataccagacacattagagctgtgaaggcatggtctgtcaaattatcagtaagtatgcttctaatgcaaagtagcttgtataagtgtatttcttaccttacatgaggattctaatggtggctggaccataacaagtgtcttagtttctctagggtttgcatttggcttctgaaggcactatttccctgtgcaatttggcaacaatatggctgccttggcctggaccatgttgttcagagaaagctgcgcaaatactcctttatcacatttctttttgcaagaggaagtaacatctggccaagtgcctccttgtggcatactcttaatggtggtgggatcccatgctagagatatggaataaccacggaggatagaaagagagcttcaccatcattagaatgagttgggagctacttccttggcactgcatggagggaaatgatcaacagagtgaaagtggcatttgctttacaagaagaaaggaggttaaatagataatcaataggataactcgaattattttgcagatgaggagatagcaacccagagaagacttcaaatacatttatttccacacttaacagccacctgggacagtattatttcctacattacatgtttttttatatgttttcttttgaataaataattctgttcatattttcacttacaaatggagagaaatcttaatcagttgagattctcaagtaaaaaagaactaaagctacttccttaggaaacacaggtctgtcttataaatgtaccatggatctgcctgtcattagaactttcctcagagagaatatttaaaaattagtttatatcactagtcttgttcaattcatcccttttattaaatgctatgaagacagagacaatgcctgcattttgttagcactctcttattaaagaaaatcaacactcaacaaaagaataaacaaacctatcctgaggctagttaaccccatgaatgttaaatattatgactgtgataattgcacatttgtaacatggagcaaatgagagtatgtttgttaggaggtaactaagccgaggttatttcctcctggaaagaaatgtgggtgtttatgttaaggaagcctagaattaagcaaagtaggaagaagaaaatccaataggggaagatgtaccaagaagaactagagtatttaggagccaagtatgattgacttgatacagacagtaaagaagttacagagatatgatattagggagatggtggggtacttccagcccaggctgatgccgggctctttgggaatctggagtggctttcaggaaaggattgtggcacagacgaatttctacttacaaagattcatatgaaaaccatgtacacactggaatatgagggagaataggtagtagagtagtagaatgtcccaagtgtaagtaaaattcaaaaataaaatgagaaaggtggtatgaagggaaagatgatacaaaatttgaagaaataattgataggataaatgattagccaaaagggcaagactcacacatagcaaagttcccaagcatggggtgaaagcattaactgaaatagctatatccagatagcaggagtagaataatatatatatatatatatatattatatatatatatatatatagttattgctgttataaaaccccacagccaagacatcttgtaatagaaagccttttatttgggcttacagtttcagagggttagcatccatgatgttggagagaaggcacagatgaacagagctggagcagcagctgagagctcatgtctcacatacagaaggcagagaaagaatcctgggagtatcttttgaaaccacaaagcctgcccccagtgacacacctcctccaacaagccacacttcctaatccttctcaaatagttccaccaattgtggcttagttatttaaatgcatgagtcttccaaatcaccacattctactccctgacccctattggcttatggtcatatcataatgtaaaatgcatttagtccaacttcaagagttcccataaattttcattctcaacactgcttaaaaagtttaaaatctcttattggatgcaagaaaatgtcttaattgtaaacctcttgtaaaataataataaaaaaacagatagcttcaacagacagtggcacagagtatgtattaccattacaaagcatgaccaaaactcagcagggcaaactttgaattctgtgactccatgtttgaaatcagagagtttagataactaagtctatctggttttgctgactgtaatatacagttcttgggctggttccactccctgtgtacagctcttcttatctcatggctatggctttcccagcatcttgggatctccaacacaatctagactttactttcacatttccacacaatggcctctcagtgcctccttgcagagactcctttgccacaggcctgacctcagctgctctccctaaatgggtcaatgtattcacacaattacaatttgacctcacaaatctgtattgttctgtatggcttttttttccctcaatgctctagtatattctaccagcttagtcatttctatggaaagagctcatctcacccaaacttactctacttagaaatcttggtacatctactacccctgaatcaattatcctgaccagaatctctgattctgatttaccaattatatgtagaattgggtattgtaaaaatttccagactattaatgctgggagggagataaggataagcatatatttaaagaaaatttgcgtacttttatataaaagaggaatgtggtaaattcgccacaggttggaattaaggagaaaggtaaagacctgaaggctaagccaaagcccactcatattcccagtgcaggtatacccaaatgaaggggggaaaagtgaatcagcagggaagactcagctgtgaccagggaacaagatgggggctaatcatgtccatttccttccatgtagcttgtcagggctcttaaggacataaccaaaatgttatactccccaggataaaacctaacagtgtctccatccctgctgtgcatgttctttggatatattttaaggtgtcttgtggctttgcttagcttcctcccagcagaagctgatatccttccctgcccccctctgcctctgtctctgtctctctctggactatgccttcactgtgcattttgctctctccctttgccaggtgtagtatctgctattgctgagtcaccaaggaggggggcgcacaccccaccaccaccgtgtgggcattgctggtggaagctttgttctgacactcatgctttcaggaacattctggtgtgttataggtgctcagcaaatacacactattattaatgttgccatcataattatttgttgcaaacctgtcaactgagttaaagccagaagtttgaaccttactctgtataggaacccattactctgtgatcttacttctgtctaggaaatatatcttacatgccaagagggatttagtccctttaatgaaagtcagatcagtattccttgacatgaacctcaaatttaacagttgttttacctgggcatgtgtctctgaatctctggctgttgtagtttcaagagcttatatatttgatgcatgttttcaggtacactttatacaaaatgtaaagtctaaagtgtaatgtgcagacctgcattacatatttaatactgtacttacaaacaaatgtatgcaaacttttattcacataaatagtatttacctaaggttttatgaatttgtgtgtacatgccatttttgtcaagatgacctgcaacatgtacatctcaatgacctatttttcttcacaagaatcataataaatttgtagccatcatcattttgtctgccctcaccatgtgatacatagttgatttatatatgccatctattttacttcaggcctatagtagctctgtacagggatgacactattcctgcctatatgtggcacctgaggagccaagatttgagtgtggcagagccagagcccacatgcacatgtgcctgttgtcattgagtatgattttatgatgccagatgttctgtctgtcagctctactgctcttctacctgtatcgcacttaaccaccaaagcccactactaattagaagtatccaatgaatagagttcattattgtactactattctgatttagtatcttgaggcatagatgtagactaagttatcactcccttcatttggaagactcttccgtgtttatttgactgtcctgtgctgtttcgtcttgatgtttttctataaaagatcagaggttctccttccttagggttacaatgatcattccttggaaatgcatgctaatttgaattttggtgcatatggtactttccagaccaatgacaatgaccaatggctggaatatatggttcctttggaaatatgctcacaaaatacgcatgtgccaaaatgcaccgctccaatcttctgctccatgtccatccctgcagggaaggtcagtacccagggttgaaacatcagggatctgatctgctcatgatgattactgaggattgagataaaacaccatatccaaaactcagtgtggtatgaagatctttaactgagcaaaaccccacaatttttagtgatcaataaattacatgtattttaaaaactggtttaagtgacacttagccagccaaaactcaatttgatttcttttctaaggaaaagtatttagaatgaaaactccagaaactactacagtatgcaagtcaaatcactttgagcttggtttcatagatgataaaaagagatgttatttgatttttaaaacccataagtttataaaatatgtcataactcaaacaagcatatgtaagcacgatatgggaagtgttcctcagcaaattttcaaggaattggaacctttcccaagccatttgaaaaagaaaagataaagcccccactatttttggactcctcaaaggatgtattattgaacatgaatgcagagcaccctgaaatggctgagcaggccattattgtggtatgctcttccccagccagggttttaatattgttttcaatggatcatcaggtttcacagaccttttaaaaaggtttgttaaattaaatctggaaaattgtggattgcaacattgcttagttctaagatattcctggagccaaaatcaaatgtctgcaattctccacatcagttctgtttagagtattgtgaaataatttccaagaaaaaatacatatctcaatcttgtaccacattttcttttctggatatgagcccaaatagttggaatttcaggcagtggatagactttgattgtggaaacaaagctatcatgtatagaatgaagaaactttctcaagactactgtttgttttgtctatgtttacttcattcatttggggggaagaccaagatttgtttcctttgtgcttgctccaagaatgtttcaggaatatattgtttgactacttattatataaaatacaataattcctatgattcattctctccatcctctaatgcagggttgcatgtttaaatatctatggggcctggcacagaaaggcatgaataaaagttgaggttgctgctctgactaaaggtgtcagtagctagtcagctcaataaagtaatttgcattcagaaatttgtagccaagattgttagaacaccctgggttgatttttctttcttgaggtaaaataaattgtgattattatttattcgtattattgaggaatatcctgattcttctaaatgattcagaataagtcaattttaaatatagcatattggtaccacacatatgaatagtgtgtgacttgtaagccactcatcagaaataccttggcatcaagcatagcatcacaagatacattcattcatcagatacttttatccagatcctgggtgtgtgctatggcagctctgtctgttggaagaagcactctgtgctcctcctttgctcccaaatctctccatttcccctaacttagcccaacatatctgttgtttgcaatgaatattctctcattaaaagtggagagtttttctacttttgcccttttttcacgttgctaattcatggttttatagagtagtgggtttccctgtggcattttaatgttcatacttacatttgcacataattatagtttgatctggcctctactggatcttccccatcttgcaggtcccactgcttccttcaagtatctccttcttctgctttcatgacatatacatcccatcccctgtccgtccccatcatttccctttagacttcatcttccttcttaaggttccctgtattctttcatgtcttctatgtatgtgttatgtcctctttaattagatcagttcctgtttccatgatagacctgtgtcttagctgccggtgtacttgaccctgtcctaatgtaccctgtccaaaatttcagatggaaattcttgggaaagtggtgctttgggaactgcctctatccctggagaaaaagtaagaaggaataaatccttgccttctggtttctataccatcattgtcctttaatagtttttttttttttatcatttcatcacaatccaacaactgcagtagtacatcactattgttgaagaactcaagatgtaattattttatagtccaaataaaggtcaatggtgtagtttctgaaatcatgttttcattccaaagggaaacattctgtcctggctgaaaagataacacagaaattttctatctacaaatttatcatttctctgacacatgttggaggagccacttccatttttatattgtcctgaactgaattgatgtccctcatgtgcagtatttttgtcatcctaaagattttaggttctccttttcctttggctagtttattttagactttagtaactgatgaaaagctttgttgttcaataattgaccttggcctaatttagagtatcaggatcctgctccttttgatcctggcattatgggtagttaaatgaggcttcagcagttgcctccctattatagcagaacagagaaggcaggtgacaacttacacaaagggacttgggtatgtttcaagcatgacaagaccaagttgcatgaagctaagaatctgtaaagagtaacaaaccccttccaaacatccttacactcctacctgctcatcctatttacatctctaaacaattatgacttaatgtcttaatttgagcaattctactccttaacatgtaagtaaagacttatgtgaatgagaaggttgtttcacttagaaattatcaatggaaaggtaaagcctgctattcccagtggtttgaccccacatacaacaggagatgtatttcttttctaaaagctcttggtcattgtttccaaagcaggaaccctccacctttgtgttagtaagcttccaaaacatgctgttgcatcttgtcctgaagagaaactgtctgccagacacctattcactgtataggtatatgaacattgctattatttatagctgtgaaaattaagccttctcttaagatggagtctcaaattctcattctaaaatgtcattccctacctaactaggggaaacttacgagattaaattaagagataataaaagacgataagcattgctgtttctctgcaatactccatgattcaatttttgtgtgtgtgtgtctaggagtccactgcaaggctgtgtaaatatctcccaaatgttttatgtccacatatattttaattactgtgggtctggagagttggctcagaagacttagatttgattcccagtactcacatggagcttcacagtcatctgaacttttgtgtcacaggttccaaaaccttcttttgacctctatagactccaggcatgtacctcgtatacccacatacaagcacactgagtacacatacacataaaataataaaataagtgtaaattatgagaattttacatatgaatacagcatttatattatttttctctcctctctcttccttttcatgtgtccctccaactcactttcaaattattggcctctacttctttaattattttatacacacacacacacacacacacacacacacacacacacacacacacacacgagatgggagagcttgctgagttcatttatcgtttggagtgaccacttagtatttaatgaccaattaggggactcatttctggagaagactgatactacagctccaaacaaccattaattactagtagctcttcatcaaaggctacagtctatgagacttcacctaccctcattgttgtgtagtggtgatgtctttgtttagttgtttgggtgaccaaattgttgagatttcatgagtagagctcctcttccccatgtttttaagatgcagtttttatgtttgaccctccctttagttctataggtttcactataattccttagagaaaaaaaaaacttagctatttaaaaggtaagtgcttgtatgtattttgcccctggggtcttcctgctgtgttaggaaacaggagtctggagactcacaagcactgcaaagtaaataataatagtaataataataatattaataataataatgataaaaataataggtcataaatatataccaaatagtaccttaaacttaggtctaaaatgaaaatttggaaacatatttactaaagtcttcaattaaaatctattcttctgtatgtatgtatgaatgcatggtatgtgaatgtgtgtagttcagaaggcaacgagcagaagtctattctctccttccaccatacaaatcctggccttaaactcaggccatgggtctcagcaatacccacttttacccactaagctaattcagctgaccaagatttttttttttttttgagacagttagtgagccccagctagcatctggtctctgcctcctcaacactggaattgcaaaccctaccacttcagtgaactttttatgtgggcacatgtgatcaaactatatcctcagtcttgtccagcaagtgctttaaggactgacccctcttcctagcccctaagttgcttttaaagatccattcttttggtaacccttttaagtcttgttaatttgtttatttttcatggcatgttacaattaaacaacaaccaagtgaaataaatctttctgtatgtatgtatgtatgcatacatgtaatccaagaggagtcagtgttttaatttttaacactgcaattttaatttaattatttctattgtttttacttactttgtgtgaggggtacacacatatgctaaagtacatgtgtggaggtcacaggaaaattgaactcatgtgttaggctcaccaaaagatgccttcatatacaaaagccatctcattgacctgcttttagttatccctgccccaaagctaatgcatatataaagctcttatgaaaaatgtagattatagttattttgttagtagactcaattgatttagggaaaggtatccttatttaaaattcctgttgatttatgatataatgaattctaaagctcataatatcaactaaatattaactttctttaatattcttataaagctggaagatgtacagcctgctgaaaatgcttaagatactgtgaatttaaattttctcttagagtgtcacatctatttgacattattttagaagagcacagtagccctatgtgactcaccatttggaccagtgagcatgaacacccccaaagacaaagacatgaacactactaggaaaacttccttggcaatcagtttctaaattccaaatgccatgaaataaaagttattttcatatcacctccaccacctacttactcattgtttatttaaggaaataatgttgtcaatagcttatgctttctatcttctgcctccactctgttcaactacatgagagtaggaaagggaactgtgaggtggcaagtagccatgagcatggtgtatcccaagagcatcgaaacattatccattccaatgcttaaagactggattcaacatgacagttccttgtatacctgccaggaattttaactaccatgaagcagaaaatgagccagtgctgtttactgtaactgaggcttctctgatctcatttattatgtagcacattcagaataagcctgtttttaatatagaacagctctcagtttcaaagctttgcagtttcagagaaaagatatcgtgtgtgtgtgtgtgtgtgtgtgtgtgtgtagcattgcaaacttagaaataaggtgtggaatataaatgtgagatatatatatatatatatatatattaatatatatatactgatcctacatttatatcattgtgttctatggaaaatgagtcctctattttgtcatctagagaagtctttgagaagaagccatagcaatatggctttcatctcttagagttagtgttaggtagcatgggtacatgatatgtgatctgaaggcaatgagactttcttataaaaaattcaaagagaattagacttgatacatctctttaatattatatccactgtactactacagaagttatatatttaatgcaggggctttactgaacactttttagtttatttggaaattgcccttttaatctgtaagactattttaaaatgctttaaaatggtggcaagtattccacatttcaagataaatttcatctttaaaagagtaaaatgctactgaattcagtgctgaaaattaagttaagctatgaaaatagataccttgttaatatcagtttgtacatattgactttttaatcatgtaagtttcagataacagggctagttttcttataaagcagtaagaattttatggaatgagacaaaaatacaaatacatttgggattcctcaatattggtgaacaggctaagtttttcccaagtgattctgaagaaaaccatttttaagtatatactatcttttcccatatttagttaaacttcacagcaaaagaaaccacgagaaactaaatctggatgaagacaaactagtgttagaatgatagaattgtcagataaatggagcttctaataaaatctaaatctcatattaaacgattgatgacctgacaaatttattactgcttatacatgatgtatgagtgacagtacatgtgccactttcacatgtacagagggatcagaggacaacttcctggagtagccgctcttcgtttgcccatatgtgagttccatggcaggaactcagcccaccaagtatgtggcagaagttccttaaaccacagagccatctcaatggttcaatgaatgataataaatagttggacatatttatactgcaaacagcagcaacaacaaatcccatttcttgcttatctgaacttcacacttaaactttctatacatttgcttaatctgctaaggctgaatgctcatcattagcggttgttccccaaacaattgtggaatacattctgctttctaaatggcccttcatttgggggaagtgacatagtcctcactatctgtcggaggacatgggaaatatgcagatagcttgctttcagagaaattggtgagtactccctgatacaatgacttatcaaagaataagatggacacccctggctgaggaaaacaaagacagctgggttggaaataggtgtggcatgaaaggactgttccttttccaccacgtggaagcacagctggagaatgaacagcactagggaggaaaataacttgagactgtggattgtgtttaagggattacagtttaatgagagttccctaatttagccacacatcataatcatgggctggttcatagcacagcatttgggctccttcctccaagaggtttgggctcagcatcctgtgtactcagagaaattgaaattgagttttattgaaaatagatttttttcatacaacatacttttgttatggattttccctcccacaacccctcccagatcctctccacccactcaaatccagattttgtgtttgctctttctcagaaaacagagtgagaaactttggaatacacaatactaaatgggatattgtcatcaaatcccatcctctcagggctcagagaacccttcagaagagggggcagaaagagtgtaagagctagagtgggtgaggggacagaggacactgtagttctggccttttgttctagttgattcactggcaataaggtcttatgtgtttgttcttacttttccttctcctagagcatctttgtatgtaattttgtatcaagcctaaatcttttttttttttagactaaaaggggaattgtaatgagatatccaccctgactgcacctgtagagctgtcagggtacatggtcacaggtgcagacgtgatggagagtgagttttagggctggggtcctggcaggtggctctctcttgcatccagtcgggtcacagggagcagcctgtgcctgtggggatccttagagcaggaacctgctgtggccatctgcttcttgtgtaagtgaattctccccgaaatgaattatatttcacctgtatttgagcctagtcccatgaatcattatacatgcctccgcaggagacctgggagacaagaccttcgagacacagcatagctgggatacatgtgaactcacagaacatggaagcatgcacaggtcctgcacaggtctaagccagatggtgttccagcactgagaatgctagtggacacatgcccctatgcctaatctagaagctatctctaatgcataacctcttgcaaaggaaaacttaggtttttcattggagtctcactgggcatacagacagcactgaagggcaggccccatgcccagcagtagatggtcaacacaaaataaactcagtggtgtttttatagtattttttgtctcataatgctttgtctgggcatatttttaacccacaattcttttgcttatatattatggtttccaattttatgtgtgacttcgtgtgtcccttcatttgtatgtttcttgtgtttttttcttttagttcttttttctttcctgatcatttgcttgtatttttcatactcagagaatttgaattcttaaagagttcccaggtgatgctgctgctgctggcctggggaccacacttaagagaacatgcacaactctgtgcccaagttagagcaactctatgtttcactggctgaaaaatggcagccctgtcagctccatctgtcttgctctgaaatttcagttttgtttaatggaaaatggagggctattaaaggctgacaagcagggtgagatagctgagttctgctgtagtaaagtttatctcgtgaccccgggggattgattgaaagggccactgacagaccagagaagcaaggctcattacatagctactgaagcagatgggacaagtcaggcacccagagtggagaggtaacatctggattgtatgcagcaattgctctagggagctccttgtagttcgtgggtctgagagacaggtggtagatttctcttaatggactctcttaagaggccaattctagaattggtaggaatttctttttccacgactacatgacgttttgaaaaaaaaatactggttttcaaatgaaaacaaaacaaaagaaaaaagcaaacaaacaaaaagaagttcttacctgtttaactaaagtaaactttcccccaaaagggagaagagtaaggtagggtctgccattcattaaaatacttacacgcagcccaaacggtcagcacatgaagatgaatagagaacaggcatatattttggtcctttgaattttgtcactcatatcctattacagcttacaaagaatacctcccaaatctttccacatgttttctcagggcagttttatttctcatgcagaaggacttcaacttgttcagatctgagtatcttattggtcagtatttgctagattctttgagaaggtctggtttacagatacataggagtaacaacaacaacaatgcctttcccagagtggcattcaaaggagtggcaacattgcaagaaagggctgttgaggactcagcatggctgcttttcccagagttgcttgagctgtatcagtactggggacaagctgtgccattgtcactcatgtagaacttactaacttttacctctataattaaactgtaaattttaactatacttttccatgaaaatgttgttttatttttgaaaccttggcaatttttttacatataaaggaaggcataatggtcacttaagaacgtgattttaccatagtagctctcagtgtcttgaactatgtctccctatagtgtatactgctttatgacctgattgttttgtggatattatctcataccaaagagtatcttctttaaaatacagcttgcagaggttataaagtatttataaagtatcacaactttatcctatatgttccagtgtttagtgttatatatttctgcagtatgcattcttgtagctgaatctttgccattcttacaaatgtagttccatttatccaatttatatttcaccatttagggacccagatgcaatgttttagaagagaaaaggataatttagaggaagatgcaacattttaatgcatggctaggatcagagcttgccaacatgtttcacttgagcacacacaggaaattatggatgctgctcccagcttaaggaaaaggaggtcaggctcttgcttgtcctgtaaccattaactacatcctaattcagatcgggctgtcagggttttcgattcccacatctagatttataaatgtgtttacacattgatttaagtggggtataatcataataaagtatttaggacaagttaaaatattgattaactgcttggcttgctcaattataaaattagtatagcaaaatttaaatgcagattatcttccagaaagtgttatgatctttttggttattagctttctaatacttgactgtaatttggttttgtttcatctacagtctttacatttcttggatgtaatcttcaaatgccttcctacttaaatatacatccttttaaaaagttaatcaggccataaaatttccatagtgttctgtttcataacatgggctagggagcttatgtgttggatcatagaatgaatttattgctggaaatgccaacagtttgtaaaccatgagtgcatctcagaggtttgaccatcagcattgaaatgtttcttctgactatcactgttctgtgatttccttatttagagcaaacagatgcaggtctcttttctctgacataactcctcagtagttgttcctcatcactcactctgttggtatccaccagtctctatttcctttctaaaggtcacgagactcagttaatcaggagtagtcacttttgaagggaacggttaagaattctggactagaaagttaaaaacaagctgacactgtgttaatcccactgaatatcacaaaacatcctggtagaagaaagaaagcaagttcaagtaactctttagaaatgagaattactggctttgaaaagatttcagaggtctccttaacctcgtttcatgtaaaggcattgaacacattcaaggtcacattgctagtgctcgctggatgagctgaggccctggtctcctgcattcatgtatctatactgcagaaatgaaggtgatttctacgcattcagaaatgtacatagtatgaaaagcctctagataagactgttgattgtagagcatagaaaaatagtatagcttttgttgttttattgtctcactcaagaagaaatttgactttttttgcaattcatatgagcttggctgtcatttataattttgttgcttgccacaaatgtttagttccatcagtctgattccctctctgcccacccccacccccatggatacaaagctctaactgtaagggaaggccacaggaaaactgagcttgtttacagaaaatctctgtggctaactttgtggaaagttcttttagctagtaaaatgagatgcatttatgttaggaatgtcatggatatatgatacatgaccaacatatagatttttaccagtagtgatgaactttgagctgggcttttacatgtagatgatatttattttcaaggatttagatcaatgttcgaatcttaatttaagtgttctctgtgcttatttcagagtggttttggctagccagaggcactgctcaactctaaactattaataaaagttttcagaatgaaaattgctagaaaaagaaaccaagtgacaggactgatgatcatttgctgttatcctgggttcccagcccagtgcacatctggaatggtgtgggcaaagaaattcgcctcagccctggcagcttctgtgggggtgagccatgttttaattagatggaattgtttctagtgtctctgtgggataatctcctcccttctaccaagaaaagcaggctaaataggatccagctgacaatgaaccagaggtactgattttgctctgggtacaactctgaaataattcagatctgttcatgacttgaatgacaacccttggttcatcatattctacaccaaccctcttctacaaagattatcctgaagtgttaaaacagtgaggcaggaagtttacaattgctactcactttttttctctatatttctatttacatatatataatatatatatatatatatatatatatatatatatatgtactttgtctccatttcactgggtttggagtctcactaagcataaggacttaacatttggatgtaataaatgtttcatgggattcttgctttcttccctgttggtgaagacactagtcactattaactcagaagcttcaaacaggcaccattagacttggtgcagcctcaaaatgtgcttgcttgacagttatacacaactaatcgccagatctacaaagcagaatcccagatttttatcttcaaaatcctggatatgggggttagattgggcatattgctccaggcacttattcttgtatgagaagagctggctgaataagggatcctggctcccctcaatcaggcaggtcagggatatctagaaggcacagttttccttctggtttcctttacaggcatgttattgtcagttacatttctcattgctctgacaaaaatacccaagaaaacaattaaaaggaactatttattttggctcaagctttcaaaagtgtcattgtatcatgcctaggaagatgggacggtttttcactatggcaggcaaagattagaatggaagcgctcaagtagggtgagagaaagatagagcccccaagaccacatcttcagttacctgtatttggaggttttctgttccgactgtcagttccctcaaccacttttgaaataatactctgaggcttaatatcaattacaactgtttggccagtggctcagacgtattactggatagttctcttataaattaacccttttctattaatctatgtattgccataaggctgtggcttactgtgatgctccaacatgttattactttggcaactacatggcatcttctgactctgccttccttccctcttcatctttggatgtcccactgcctagctacattttgtctggctattggctgaaacggctttattcatcaaccaataaagccaacccacaggcccaggatacagaaaacatcctctcactaggtcccacctcctccttctcaattcaaatcaagttggcaattgactatcccaatacccatcttatcttttaggcccttgaatcctggacacaatcacaggctacatgatcatgtcaacatcttccattcggtagcagtcctttccttttccacaggagaaatagacagggatctccaaacttctgtaactttcgcattcatattcactaacaagatcattttatttctacatttgtcaagagttttaaatagaataccacacatgtaaagtctagatcaatgttgtcctccaatgaagcatttggttaatattcatgatccttccaagtatcatatttttctggctgttgatactgaagtgacagtacttgttacttttaactttgcaagttttctttgaaactactacctcaaagcaatctccactttgagtgacaaaacaccccagttgtcctcaagaactactgctgctctcacctgccttccatcctgtggacttctgagaacttgttaatgggtcttacaccacatcacaactttcatttctattaaagtagcattttcctttgatttggacttcttttaatttgtttcatgaaactgaaaatctgccacaacacgaaaattaagagaagaaagcaataatttaatgttctaatgattcttgaaccattctgtcctgtcccctggtctttctctctgggctccccgatagcaatttcaccctcagagcagcagaaacagctacagcaagaaataaacccatggtgatagtgctaaatgatgtggatgactttgcaatcatttgggagtactgaatgcttagagagacaacaagatagcttttgtctatacagtgactgacaccttctcaaattcttatcttaaaagtatgaaaaaataattcttagagactgaagagaaatggagaagtgacaatgataattacatatgaaaagtcactatggtcaagcttaaagggtcgctagtgctcacgccactcacacttgttccctctgattgcaatggccttggtagcatggttgtctttgaaaaagttagcacaagcagatgataggcaacacgttgcctaggctacatgactgaatccctagtggtgggattctccgcactgtgctccctgatggctgcttttagccaatggtagccagtgctgttttctactgttgtatgacatttgtcatcattcagcctcaaaaatctatgtctaagtcacttcatgacttattctttttgaaaggaaacttgaaatccacatttacagtaggcatcttgggattggaagtagaactaaaggtagaaatggataaagtaatattcagagcatcctttctcttccgagggttgcatttgtcaagattgacatatgtgttttgttcccatgttacaaacttcccattattgtcaaccattatcttgttcaatttaagtcatacactatgttatttggcatcttattgtgtagtaaaaaagtcaaagtgtgaaaattatctttatttcttcaatatatgctatttgtatttttctacaaaaagttaaacattaataataaatggggaaatttacaattttgcttttggaagatatctctgcatatcattagtagctgttcttcctctggtgtggtgcaaagagaatgaatttgaacccagtggactgaattggaaagtgatgaaaaattataaactattaaagttatacatataattttatttctaaatgaaattaaatttaaatttgtagtttacatttaatatccctataaatattcataaaacattggatgagcacagaaaaataagctactctgtcagaaaccagttagacaaggaaactgtagaacccatgcattgaaaggaaacttccaattcaagagactgttgtgtgttttatggtcggctggttgtgataacattgagaaaggagtcttttggtaaggaaaagcaagtgatgatgatctaagtgagggaagaaaggacaaatattgtaggcggagggaatagaacctaggaaggtactaaaagaagaatgaagcatgctaagctatatcagtttaaacaacccgatatcctgtcagtatggatgggagatgggaagcaaagccagagctgcaaaaaattgtatggaccaaactgtgagaggtctttctgatcaggtataaattctaacatcatggtgagggagtgtatagcttctaaagcagcgaaatctctgctcattagaatttcctggaaacatttttagcactatccatgactgaccccatcacagactaattaaatcaaagtttctcagaatggttcccaggcattcggttttttaaaaaatctccctagatgatttctaacacacagctagttgaggagcactcttcaaaatgttattaggcagagtgtaaagtgacagaatgccaacactttgaactggaggctcacaagcactgacatgaggctgcaaacccaacatgctttgatgctggaaaaggggaagaggaagacagtgaggctgtttcctaggtttccagttccatgaacagggactaaatggggattcaactcaacaaagtagaaactataacaagcttatggcttaatggaaaagacaggatttttccccctagttgagtctgaaattctctgaagcatatctagaaggctattagctgcacatgtctgatgcagactcaccagcatatcttagactctgaaggctcaggaggaggcaagagctcatgaggagtagacagtgcctgatgggtggttcttacaatagaacatctgctttgcatgtgtgaggccatgggttcaataaaatatgctctcttttctgtgtaaattctgtgatatagaaatcactgaaataactaagcccctaaagccatcaaattttaagaactgccttagttacttttcaatttctgtgaaaagacactatgaccaaggtgattggtgtaagtgtgagcttacagtttcagagggctggagtcaatgaccatcatggcaagaaacaggactgcatgcaggcaggcagtcatgtcaatagagcagtagctgagagtttatatctcatttaaaagcagaaagcaaagagagcaggagttaactgggactggtgtggatatttgaaacctcaaacctcatccctagggacacacctccaataaggtcatacctcctaatccttctcaaacagatccaaaaactttggaccaagcataaaatatatgagccaatggggaccattcacattcaaaccaccataagaacataggagaaaagggcttgcaaaagacatcaagatagagtcaaattgaacaccgtccgaattaattgtcatcttgtacatgaatttgttttttgcccatttgtgaaaagtaataagaaaaacttaatgatttacttaagaccacagcttaaaatcaattgtacatcattaagcaaacattccccaatgaatgtcattgcattttacaagactcataacattcagatgctgtttcactgagagagagagagagagagagagagagagagagagagagagagagttgggtcctctggcacttattttgctgacaaaacttttcaaccaagtaacttctgcttttatgttctgtccagctgaattataaggataaattcgctttgtatattaaaataaagaaaacaaacaacaagaacagaaactgatgaagttttcttagccataatgactcataatgtaagtagccatttctagttccctgctcaccattctgactctgcaatttccccaaagcaaagttccaactaccagatccaagactagttccactttagaagcatttacttagagatgaaccaacaaattaaaatgttcagctttaaaaggtgaggaaacagagggagtgcagggtcagagataccttgggggtgatggagttctaacaagtctagtctaccatgagacaaaacatctttctcgttgctcagcagtatttttccatacagaaccaacagtctcctgcctgatagattgcctataattctaccagctagatcctttcagtaggcaagagtagcatctcattttgaaataagtaaaatttgtgtaagagtcttggggctattggccactatggggctttgtttggattcttttgcctgcttagtactgtttaatggcaatcaatgggcaggaggcagggggcagactggttgacaaagtagagcttggtcatttgagaattctgcagaagtgtgtagatggctgggcacttcaattgagaaacagttcctggacaaaaacttagaactgatgacaaagggaatcttgaaagttctggatggtatttatgtgtgtaaatatgattaaattaactgtaataatcttgatagtttagagtgttttctctactgagacagttaaacaaaagtctacgtatgactcacttatgacacttcaccatgggctggtatggcatctgtattcaagactccaatgtctgtcaaatcacaatttcattatctacacatactgaaacatatgcttagtggtatttgtacatcatacctgactctaactgattttgagcaagccattcaataaagaattgaattcttgatctaacaacccaatttaaaagcatattttagagcataatgtgtttttaaatagagctatgccagacatgtatgcactgatataaaattgttgagacataaagagatttagccaccgtgctggactataatattaaggatttggaaataaaatatttgtaaattctataacaggtaacaacaaacaaggagcctttttctaaccaccacattaaatcaggagctacaaatgaagccactcaaaactatgggaatccacattgtttgttctacagtaagaaaatctaacaaaacaaaaatactttaaatgcttcacagagaaaaggggagttatgtttcatgtcagatgctagatgagtttttccccagcgacattgtagagacatcattagctccactgtacatgctgggaagcccaggctcagagagggtaagtaattagcctagggacacaaaactagtacttaaaacagccagaactaaaatgcagatctggctgttctgccccttgtggatcacaaattattcccaccactttgttgcattttacaaatgtatttctttgtaacacttgtaatttttgttattgagacttgtttgaagacatgtactagaaaaagaaatctaagtacaatgcttccctgctttttgctttttgtttgtttttaaggctgagcttcttattatctgcttggaagcaaaaatgctaattgtggttccataaccaaactgcaggggtactgtgtgggctggtttttatgacaacctgacataagaggcatctgagaaaatgtaaccttgattgagaaaatgtgttcataatatttgacagtaggcaagtggttagtgtcttttcttaattagtgattgatggggaaggccctgcccattgtgggctggtagtcttgagtactataagaaagcaggctgaacaagccatgaggagcaagacagtaagcaacacttctccatggcctctacattgctcctgcttccaggtttttgccttgacttccttccgtgatgaactataatatggaagtgtatgaaaaataagtcctcttttccctcaagattttttgtcatagtgctttatcactgcaatactagctccttagataggtgtcatgcttctgtttagagttcatgaggcaggaccatgcttatagaagaaggcatttttgttgttgttgttatttttggtttttcgagacagggtttctctgtgtagctttggagcctatcctggcacttgctctggagaccaagctggcctccaactcacagagatctgcctgcctctgtctcccaagtgctgggattaaaggtgtgtaccaccaatgcccggcagaataaggcatttttaagagagctttttaatttttattttgatagaattgcaatgtgatttgtgatgcaggcaaaatatgttgttttgtgttctagtgtggctccattttggttagcttttgttgttatcactgtttaatattttatcaaagctttgctaaatttacattgtacagaacatcgggcttctagttgaatgatgtgttcttttcagtaagtgtttccctatatattaaagtattggtgatttagcacaaaaataaacagaattagtaccatgtctcctttgcttctcatctctcttatttcttttttcctttctttcttttagtaaagagctaacctaaaactcctgagcttttcacagtaataattccatgatggttcattcagccctttggagaggacccttttctctaggaagatgtgttaaccacccacaggaagagctatggccgtccatcaagagtcccttgtccatcaaacgcatgggtctctatacaagttgcatgatatgcgtcaattctgccctgtaatgcttgagcccactatgttccagaaactaagaatgcaggaggggaattgtaagaggaaccaaccggggccatggagacaatcaataggaaggggagtgcactcttttgctattgaaacaatagcaactactaatgtaaccagaggaggctgagaaaggattgacagagcactacacagagtggagaattcttcagtcctggccttgcctggagtggctattgatatgcagccacagcagagtgcaggcgcaacagagtgcaggtgtaacagagtacaggtgtaacagagtacagtgaaacaagtgcaggtgcaacagagtgcaggtgcaacagagtgcaggtacaacagagtacaagtgtaacagaatacaggtgaaacagagtgcaggtgcaacagagtgcatgtgtaacagagtacaggtgaaacaggatgcaggtgcaacagagtgccttgtaacagagtacaggtgcaacagagtgcaggtgcaacagggtgcaggtgcaacagcatgcaggtgtaacagagtacaggtgaaacaggtgcaggtgcaacagagtgcaggtgaaaaagagtacaggtacaacagagtgcatgtgtaacagagtacaattgcaatagagtgtatgtgttaacagagtgcatgtgtaacagagtacaggtgcaacagagtacaggtgcaacagggtgcaggtgtagcagagtacaagtgcaatagagtgtatgtgataacagagtgcatggttaacagaatacatgtgtaacagagtacaggtgtaacaggatacaggtgtaacagagtacaggtgcaacagagtgcgggtgcaacaggatgcaggtgtaacagagtgcaggtgcaatagcgtgcaggtgtaacagagtacaggtgcagcagagtgcaggtgcaacaggatgcaagtgtaacagagtgcaggtgcaacaaggtgcaggtgtaacagagtacaggtgtaacagagtgcaggtgcttggaaacttttatgagaagggaagggagtctgaatacactggaaatgtcatagacctgagaaaagttgccagatgtgaaaggagcattgactgaggaagacaggagccttccacaggcttgatttaaagtgaggactaaaaatggatagacagcaatgtgacattccaactccccactcccttcctgtaggccttccactggtcctcatctttttttctattttctgcctttctttaaatctgtaacttttatttgtttctcgcctctccctgacaagttttatatattctactccacattccctgtaacttagctctgtattgtacttctcagtctcctcattatatttcccctctttgacttgtctctgtgagccaagagtggttcagtcagtaagctgtagatagaggctatgagcatgtatacttgcccatctctagaggtgatgggatctcccatccaaaagatgtggccaatggagtgtcacaggtaaaggaagggatggagctgaatacagatagagcaaatactacccatgtatatcattcttcaactggatacataggggtctaagacaaagatgcccttatggggtttatgttgtagacagggaaaacataaataatgtaataaattcagaaagaattgagatctttaaaattaaagtcagggattgctaaggggtggtagcattggccatggatgttttcgatacggtattaggaaagttctttcagaaagtggaactaaagcaaagacctacgatatattttcaaacagtaggaggacaagaattctccaggtggccaacccctcctgtcttccacccccttaactcccttaatcagtttgtcttcccacatccagttttgttgttccttaccctaaatagatagactagtgtgtgggtgagaactgataattgttctctaacacttggctcactggaaacagcatgggcatatttgtcccacctttaatccttataataactacagtggtcgccatcgtctacaaaacatatgtcccaagactcccatagatacctcaggcagtgcatagcactaaaccttctatgaactgtgttttttttctcatgtatacatacctatgatgtagtttaactatgaagtgggcagagtgagggctttgtaacctgggtagaacattgataaggacattgtatgataaaatatacataattctagacttctatctctctaaataattatactcactacatttgactgagacaattaaaaacaaatagtcaaaatgcagatattggaggtgaagaaagtactgcattttttttctagatgctacaaaaaagggtcaggtttagacaatggaggggatttcccttccccccacctctgctttggatagatgaaggcgtatttccaatctgttaaccaagaaagttgtagtttggaaattttattaatacatggatagcctaatatacatattgacgtgatattacacagtctagattggtctccatgattcattcattcatttacatttgtagagtagccatcagggccggaggtgcatgggttttctttttgatgtttctaaccacaggttttggtttgggttcagaaaatatctgaattttccgaaataattaaaaagatatctctgtacatagaaggaacaatgactctataatgtctcaccactaatagttcctatgatctattgaccatctccatccaatgtaagagccagggagagttgttgacaattcacatgaggagcctgcttatatggagtatgaattctagaggaactcagggaggaagagcctatgtttaagagacaagtgaacaaacaggaaatgggtgatttaagataaatccagaggagtggcctagatggcaccagcttggggaggaaggtcaggaaagccttttggggaaagcatttcatacaagactagcattagaaaaagggagagcagggctaagataccatcagacatatctaaaaccttgtgacatgtggcatttcattatcatctaccaagttcatgctcaagaactgcacagttgagattggaaaacaattctgtataaagaatcctataacattttaagcatacttgcaagtttgtgttgaccagcattcacttgtagccctagtcacatgcagcccaccagttacaggctgtatgtgtctgaaccatgcttctcctcaatggttaaatgcaactgattttactatgtactgtatttattttataacaatcattatgagacttaaaatgatatgatatctgtttgatattcaatcattcctctcacagcatgaaagaattgggctagatgtctttaacaccgagctttaatcatctgtacttcagatgtcaaaggaaatgcagtgtgccataagccagagttccagattctgcatgttttacactggcagataattaaagtagcatatgttgatttgttattcttcatctgttatttttaatttcaattgtaatagaattccagttacactgctagtggatgttttttattaggcttacataaaatcagatgagtggtgctaccatgaagtatttgtgtgtatgaagatcttaaatttcttattaagatttgaaagagggaatgcatacatgactgagtaatatatttataaatactaggagtggcagtgataggtaaggatgctactacaccttggttttatgcatttgtattagttgttgaggttccctaattgtgctacttgaaaggtgtggaaaattgactcattttcagtgcaaaaataaaggaaattgggtcctcaggatctccagtcaccaagtttctcattattcaaagttgttgatcattatgatagttgaagaagattctgcataagaaatgaaacctattttatatttggctgtgaggttatgtaactacaaatagataacggcttatgcctttcaacgaactcagttggactagaatggtaatgagttccacaaggtgccaaaggaaaaaaagaataaatagggaacaaaaatgtttgtgtaattactctacaatattatatatttgtgttttgagccttctagttgttgtagacagaagtttgtttcctgcctggtcccacagctgtttagttccaaaataaacacacagaggctaatattaattataaactgtttgactgatagctcagacttccttcaggctagctctctttctcttaattattaacccatttctattcatctatgtatctccatgtggtcttggcttattggagaatgcctagagtcctacctttccagtagcctcatggcacctctctgactctgcctcctacctttctctatccctgtttggatttcctgcctggctaaatcctgcctgtccattggctgaaatagctttattcatcaaccaataagataaacacatatttacagcatacaaaaggacatcccccatcaagttgtaattaaaaatagagtttgacatgaaatactaacttgttggtttttgcttgtttgctttgtgcatagttgtgtaggagatgtaaaacttccctgattaataatgtgctcagggcatgaagcaaagtcacgtgtgtaacactgctctgagcctttaattacagagaaatgaagagtacaaaacatgattgtaaatagaggaaattgatggtagataacttacttttaattaaatattaaaataaaacatactcagctagtttagagttactcagaacttggtaaatatctcctagtcttgctgttgtccatctcagcaggtacccctgtctgttatcaataaattttggaatcccccagttcttggtgggattgctattattgctataatggcttccatttctggcactacatcttgtttcccctctttggttaccactggtgacttgccatgaagtttcagagcaggtaaaacacacaaccatctctgactgaatgtaactatgacttctgttctctctgtgccctttgcatcttaaggaacatctctgtccaaattaggaaagtcattatttttaacccagtagaaatcagacacataggtttcttcttggatggaacataattccttagctttacctaagtctttaagtcccagcccaggagaatgctcttaaaccagtgtttatttaaaaagcctaacagcatcctgaaaccatatttggggaggaaaacttaaatgagctttgagcatcttaactctgggcatctccagtccctttgcacctttgaagcaaagcttagagttactcttttccagggtcaatctttaaaatagatatcctttaagaaaccactaggatcaagatcagccttctaataatgtgcttttgccaagtgatgcagggataaatctagggtcagaacttggctattaactttgggaaatgtggataccagggtgttcacatcacaccacttgatgtgattctgttcctggagtggcccagcctttagaagccaggtaattaaaaaggaaaccatcaatggttacaggttgtaactattgtccacagagagtcacatgaaggagagacctaaaggttgatagataactcccactatcaatctcagcatgatctagatgttgtgctggtttgtttccattggaggtgaattaatgtagaaaggccagtttctaaactctatgaaggtaagtatctgagagtaccacttccatagtaaacaggggaatttataactttcctcagctttctagggtgtcttggctactgattcctattgtgaagcatgactgcttattttcctgcttcctcttatgtgtatgtacatgttcatgttagtgtgtgtgtgtgtgtgtgtgtgtgtgtgtgtgtgtgtgtgtgtatgtgtgtgtgtaggtcattagacacctcaagattgttttcagtaatcacattgttttctgagaaaagttaaggcgctggaactgaagaacactggtttgaatagattagatgggcagatagctctagagatctgtttgtctctgcttccccaatgctgagactctcaagcatgtactcacatccacagcatttaatatggacattttagattgaactcaaatcctcaggcttacacagccaataatttattgactgacccatcttccaataccctgattgtcctttctttgtggtagagggtgaaggataaggactagggagccaggcatactatttgactcttgatatcttcttacttgtagtaatgtactgtgtatgagccactcttcttttatctatgaactggaggaaagcaataggttcccaaagtatcattgttggaattagggacaataaaatgtaatcccgaacctggaacataccatggacccctaattagtttgtaatctttctttccataaagaatgtttgctcctttcaactaggaatagaggaatattctcaaaatctgatctgcagagcagcagtgtgaacaccttcttgaataaaaatgaaaattcttttgtttataattttaattttttattagttcaaattaggaacaagcttgcttcacatgtcaattccttctccctctccctcccctcccccatcagccccctcccatttgccccccaagtagggtagggtccttcacagggctccccaaattccaccacatcatccctcccccatgtgtccaggcctagagagcatcccttccctctcaaagtcccttcttacaccagggaaaaatactaatccactaccagaggccccatagagtgccaaggcctccttgttgacatccacatttagaggtctggatcagtcccatgctggcctcccaaacaacagtctggggtccctgtgctcccccttgttcaggctagctctttctgtgggactcacgagactggttccgacccctttgatcttcattcctccctctctgcaactggcttccagagttcagttcagtgtatagctgtgggtgtctgcctctgcttccatcagccactggatgagggctctaggatggcatataaagtagttatcagtctcattataggggaagagcatttaggttttcctttccaccattgcctagattgtctgttggtgtcatccttgtagatctctggaaatctccctagtgcaagatctctccttggacctacaatggcaccctctgttatggtatctctcatcctgctctcctctattcttctcctaactcaacctttctgctcctccattccctcctctcccctcctcttctcctctcattctgccagttccctctcccctacccctctgctcacaattactcaggagatcctgccccttcccattctcttgggtccatacatttttctcttagagtccttcttgttttctagtttctttggtgaagaggattgtaggctggtaatcctttgctctatgtctaaaattcatatatcagtgagtacataccatgtttgtctttttgtgactgggttacctccctcgggatggtttcttctagttccatccatttgcctgcgaatttcaagattccattgcttttttccacagagtagtactccattgtgtaaatgtactacattttctctatccattcttcagttgagggacatctaggttgcttccaggttctggctattacaaacaatgctgttatgaacatatgtccttattgtatgaacatgcattatttgggtatatggccaagagagaaattgctggatcttgaggtagactgattcctattttcctgagcaactcatactgatttccaaagtggccttacaagtttgcactcccaccaggaatggaggagtgttcctttttcttcacatcctctccagcatagattgtcattgatggttttgattttagccattctggccagtgtaagatggtatctcagagttgttttatgttgcatttctctgatggctaaggattttgagcactttcttaaatgtctttcagccttaagtcctacttgaaacctgaagaatgataaaccatggtgttaggagctaaaaggtgatttgacaagtcctctggatgactctgtgcttgttgaactttgaaaactgttgtaatagtgagagagaaggccagttttaaatatcactgtctgacttaatatgtaaagatccatttagtctgaaatttgtgattgggccattcttttaaaccttgttcacttcaaggtataggataattatcatttcatttctctatgagcaaagtaaataaagattgtttgagtaaaaaatatatatatacagctgctagagagttggatcagtggttacaagcacctgctggacttgcagaggtcacaggttcagttcccagaaccagtatcacagctcacaactattcatattttcagttccaggggatccaatgttgtcttctgaccttcatgggtattaggcactggtgcacagacatacatgtagacaaaacactcatacacataaaacaagtcaattctaaaggcttttgtaaaaagatgttgactttataggaatgaataaactgtcttcttgtgctgtgtcacaggagttaaaatggagtcatatagatggtctgaaactggtatttctatagctctcagctccatcaacagcttttggacctttattcccctttagagtctccctggcatttctggaaggctggaatttgtatttcaaccgaattactaaacaccccctatgttctttcagtctaccaaacactgaggtgacttctcactgtgaaaactcataatggggccacccacatctctgctgctgctacagccattaattgccctaaagctgtgtctgctggtgattctggtgctgtgtgctgaacaattggtattgctgacactattgacaatacaccctgggtggctgcctcagagatatttatactaccaagcagacatgctccattattcctagcctctgcctagctctctgtgttgtttgggctgtagataatagggactactgatcctcccatcgtggatggtgtcctgtgctgctgctgttctcactgaaccctcaaattaaaaaaaaaaaagctgtggacaaagctgaggggcttggtcagtaaatggtttgccttgcaaacacaccaaactagcttaaaaccccagaacccacactagaagtgcctgtcattgtggcaagaacttcctaggaaggcagagatcagcaggtctttgggttcaccgaccaaggagtttagattacttggcaagctccaggccagtgagagactttgtctcaaagcaggatggatgctacctgggggatgacacttgaggttgttctctggcctcaacacagatacacacttcacgtgaacatgtgtacatacttacatacaaaaaaaatgtcaaacacaagtgatatttcccaggactctgtgccaaagtcatcccattccattctcaagtgtgatccctccaaataacacacgcttagacctctaaagtcatagagacttgattttatttaaaatttaatgctaagtctgcaactttgtaagttttttctatcatttttatacccaaacattcattactaactgtagaatacttctgttactccagaaaattcctttagacattttaaagttgaacagcactgccaagagatctactgtcacatatccatagacatctaccagtgtctcctttcctggaatttcatgcagagtaagtctgtagtgatcatgcagcaggagttgcttttgcctttagtttctttcacccagcaagatgtttccagatccaggtataaaggtgtgtgcatattgcatttgttatgtggatgatgagtgctgcacttgagaatgtaacagttcacttctattttccttttgatgtatatttatgttgtttccagtttgtagttttacctccttgggctaataattactgaagaaatcaccatgcattaccactaattccctgtttgtgttcaaatgttttatgctgatacaggaacaatgcaaaacaaaattccacattgtcagtctgtgcctttattcttgttttcatataaatgatatatgcttcaatgtatgccataagctatactgcatattgttatttggtttgtcttaagtagctaacagtccttaaaagaaatatgcaatatttcttttcttggtcaattaggcctctgtcaggcataagtgaagcaaatccagcccacacaaacttaagatggaaactgaagactcaaaacaaccaaaaggaagtggatttcctgtgtctggaaattccttagctcttctttccttcttccttccttccttccttccttccttccttccttccttccttccttccttcctttctttctgtgcctccacatagtagtaagatggtagacactgtaggcattaccctaaatctattgttgaggtttaatagaaaaaggagaatttatttctctgaagacaaacaaaatttcttatgactgtcattagtttcttcatgtacctgtgtctgacctactcactaagcaatgacaagattagctggctcctactaaactgatccaccagtgtcaaaaatgtggaaagtggaactagagaatgactccacagttaagaacattggatgctcttctagaagacctgcattcgatacccacaaacatttgtaattccagcaccagacatacagtcagtgaatgggcatacatctgtgcaaagcacttacatcaaacaaaataacaatttttatgcaggaataatagatggccaccttaaaagaacaaatactttttttaaaaggtggatagactactatacagctatgccagatggatattagtgtatttctcaaaacaggttcttgggagttcatattgttataaatattaagttgttgagattttaatgcagggtccattgtatgacttctcacaagagaaatctagccccttattatctggctactgtaaacataaagtttgtgggatgttttatgtgttccccttagaagtcacccacaggacattctttgtgtacttctcagagtcttaacccttaaggcaccctgataatccacagagccaacttactgagaatttagtgaatgttgttaaaaatcaatctcctttcttgtaagaaggctgaaaaaacagaaccgtaacttgtcaaccattgagttctgttttcagttaacaccttattgtgaaatcatgagaaacatacataatatgaagcttgggatagcattgatccagaaccttctttctctgtgtctcaagcactggagaagagttgcaaatcctagctagctttgctctagccttaacatcctccatggcctcagagaatactgttcacagccccactctatggactctcaaagtctcacttccacaaacctcagtccctttctccctgctctgctgcagcttacaggataggtgagactcactcaatttttttagggcaaatgaacgagataggttgctatttaaataaacaaggaaaggacattttttaaaaacatgatcatttgtttatcagaactgttcaccccagtgctattttgggtgattaagagtacaaaatactgttggatcctgtttggtattaggtcatgtttatttttaaagtgaggcccattagtctaagtgggatgagattttgttcctttgcattagtcagtagtacacaatagtactttttaaaaaacatactggtttcttccaacagatgttttccattgatatagaaacatatggggaaattttgtatttctagctattacaatgtattttcccttcctagatatgcctgtgggtgtttatgaaccttgtctgtacaacatctgtcacagatatacttaggatcctcactatcctgtctgcattcttggattatattctgtccttagaaacacactgtttatctacttgatgcttacagggatctttcccatgctcacttacttttccaatgagccagagagatgaagcgcactaaatatagaacgttagacaaaggtataactttgtccatgacaaacccaacattgcagtgtatttgctgattacatattcattatttactttcctcaccaccaagcctgcctgtctgccttatttcattcctcctgcctctctctcttcctcctttcttcctcttctcccctctgtctcccccatcctgctcctcctacacacactaaagatccactgtatttcaagaacacaatgtagttagtgttgtaatcagtgtgcatgtaaactatattccccattccagaacttgttcatgtcactgaatttgaaactcggtacactttgccaaatatccacatattgctcttcctaccaacccaagacaaccattcaagactcaatgcctatgaatttgactacttaaggtctaatacagaaattataccttttttcatctttatgtgcttgagacattttttaaggaaagactcaaggttttgttttttttaatatttttaaaaatttttcctttcatgtgaatacagtttcttccccttctactcctcccagttcctcctcacctcctttcccatccaggtctcctctgattctgtctctcattagagaagaactggattccagtatataacaaccaaacataacaaaataaaatataataatatcaaacaaagacaatcatattaaagttcggcaagtcaacagaaaatttgaaaaaaatcccaagagaaggcacaaggatcagagacccactcactttcccattcaggagtcccctagaagtaccaaactgaaagctatagcatccatgcagaggacctgatgctgacatattccagctctatgcttgctgttttcgtctctctgagttcataagaactttgcccaattgtttttagagggcctttttctcccagtgtcccaattctctctgtctcccctctccagtctcctctttcacgggtttctgtgtgctctgaggggagagatttgatggagacatcacatttagagctgtgtgttccaagggctctctgtgtgtgtaaagtctagtaccacagatgttaatggaataatcaatcacttttaaaaattgaatctaaggctcgctccataaattctttgtgtattttaatcactaatcctctgcaagatatataactggcaaagatttttttcctactatattggctatcttactcactagatggagagttttatttgctgtacagaaccttgttagtttcatgagattttattttccaattaccatagcccaagttaaaaaatcacttgtagtgcctatcggttgaattgtattccacactttttcctctagcagttttaggtttactgctaagtagttccaggaaataacatgtacaaaacaatttaaaacctggaaggatcattcagcacatatctctcaaaaggtatagatactgacaacataatttctctaggtatttatataaattttgatgtttctaatagaaaaaagccaagtaaagttgtaaggattaatgcatacattcaactttcaagaactagacatggaagtatagtttgaaggaaaaatacatgaataaaacttcaaagaagtcaaagcatggtcaggtggatacagaaagatccatggcatggtggcacattcctttaatcccagcgcttgggctaggctcacaaccaaaaatatatgaggcattgttcttaacataatgctcatttggttcatctttgtcactataaataggtggatttccttcttttaaaagtgctgaatagtcttcctttgtgcatatatgccacactttttttccattcatatagtgacaggttgattccatatttaaacttttgtgaatattgctacaatgaacatgagagcgcttagtcctactggcataataatttcatttcttttctgtatatacctagaagtaagatttgcatataaggaagttgcatttttatctctgagaggctactttactgtttcccatagtgacagtaaccatttactttcccactaaaattggacaattgttctgttttcttcccattctcttcatcttctgccttttcagtaataggctaatttatattttgctgtcattttttacacattgtcttttcagacagttttttagctgtagaagtagaatgacttttgtacatagatttgattcattgaatttgctaagttttaatctatttccccctttcctctccccatctcaccacccccctctgcatcatgtgtgtttagtcctggggaagaaacaatgaaccttgaaagttttagacaagttcttgatcaactgagccaagatatcccacacatatcctaatatatgaacatgtcattgtcatgcacagataattctttctaataggacttctagttagtaccatgttaagtagaaatggcatcagtgagcatccttagcttggatcagatattagagggaaatttccaatctctgcattgtgatgttagctatgaacgtctcatacatgtcctgcacttgtcttcattgcctattgcacttcaagcatttgattaagccttttaatttttgctagtataacatcattacatagtttcccccttttctgtctgtgcatcacatacatacagtgcctgcagaggccagaagagggcatcagatcctctggaattggagttacagatagttgctagctgccatgtgggagctaggaactgagtcgatgctctcaatcacgaagccatctctctggtatctgcatttctaatcctcactgaaataagtatgtttgctctttgtctccgtaggtgtggggtgtataatgtttattgatatgtttatgttaaatcatccccacatcccccaaatctgcctgataagctaaaggactatgattcttttgatgctttcctgtgtttttcgcatccatgttcacccaagatgacaggccaagtggtttttgtaatttttttttgatgattttgtttggagtgatgctggcctcataacatgggtttggtcttgtttcttctattttgttgaaataattctagaagattgctattgattcttctttgaacgttagaatttagctttgaagccatctggtccccagcttgtctacatgggcagagcttttgattatcatctaattcaggctcttgacttgtttgtggtctgtttgggctttcaatttcttgattcagtctttgtctgttctgtatttttaggaatgtattcatttcatctgggtgatccagtttgctggaatataaatgttcacaatacttcctgtgtgtatttttttttcatttctgaggcatccattataattttgaatttgagtcattttcaggatttcttttcttggttgaggtgaaagtttgctaactttgccttttacaaaaagaattagatattagttttattacttctattatgctttattctacatttgctttgttgctgtcttcacttttatttttctctccttctgataacttccaattgatcttttttattccagtatatgtaaagctacagttttattgaagattttttaatggaggtgttcataatgagagacttttctctgtactgtttttgctgtatcctatgactttactatgctgtcttttatctttatcctgaaaacaatctagttacatcatctcctctggcttttcatgtttttcctaatctgtttccagtttaacattatatttgtattttgtcacattttcagtttgcaaagtgagtcattaaaggtctggcacttttataagaccaatgcaccaagaactcataataagtaactttaccccccccatacaatactgggatgttaaatacaatatattaactccaaagcagggacagaaagcaattcttctctggccatagcattgttaggcagattcagtgaatcatcttcttttgctctcaaagtagtcagaatggcagatttttactaaggagaacaagggcacagtggagaaggcagacatttgaggaaagtggccttgaagatactgaacactgagaagcagtttgtcctctgaaatcagtcactatgtagtatgccacttcttgatagttaactcatggttgtctatttacacagcagccttgtagagctcaactgtcatgagtgaaatagaaggtatttccctagctcccaaatcagcatctgctccaagagactctgtactaatttatttctcccagtaacatacggattcctagatttttatactatgactttctgttcaccttaaactaggatcaagaggaaattgatgttgccttttaaaataaaattattaacatgtggaagtgtgcaatgtggtttaacaaggcgttcaggaaaatttgaagtagagaggaacagaaaggctacatttgaccacgcacattttctgcatggaactgaatggcagaacattctagtcaaactacatatgcccatcattctgaacactgaagggctgtgccctttctgtgtttctttcttttagatgtattgcctcatacatacattgccattagttctggtatgtgttatagtagatcataatgagagtgagcgtggtgataaggacacactcactatcttcattttagtaagtcttttgtcctgggtggtttttatgtcaactggacacaagctagaatcatctgagaagagcgacactcaattaagaaaatgccaccataggatcaagctgtaggtaaacctttggacattttcttaattagtaattaatgtgatagtacccagcctactgtgggtggtattgcccctgggctggttgtctagagtgctatgagagagctaaatgagcaagatgttggagcaagccagtcagcagcaatcttccatggcacatacatcagctcctgtcctcagattcttgccccattttgagggtctgccctatctgtttttgatgatgaactgttatatggaaatatgattgaaataaatgttttctctccaagttgcttttagttctggtgtttcaccacaacaatgaaaaggtctaactacaggaactttttataagcattcttgcagcataatttacttcctacataaacaaaatttcactttttcacacatacatgcaatctcacacttagacacactcaaacacatacacaaatgctcacacactcataagctcacatgtgcatatacatttatatagactctcatacacacacacacacacacacacacacacacacacacacacacacacttacctataaacactttctaaccctaacattaagggaatcgtataagtgtcttacctatgaaggttctctctctctctctctctctctctctctctctctttctctctctctctctctctctctctctctctctctctctctttctctctgagtgtgtgtgttatatattaagaaaaatccatccctcagtttctctacttttaatgtgtcacccactcgtattaatggtgtactatatatgaggctctatatagatattttgcagacattatctccttgaacacatacatgaatgtttgtatactatgattctatttcataaatgctaaaggcttgaggctattatgatcattgccaaggtcacacatctggagcggtacagctgaaatgcaaacccgcacaatgtgaccctagagcaccattgcttcaaaacattgccataatttataggcaaactagcacagctgaataaaatattgagactagactcactctttaatcttaaaagatttagattctgtgggagcagtttaaatttctaactctatcatctattaactgcatgaaccctaggggagttatttagtctttcaatattccagctttctcttctcaagaacgctgctgtgagccatcgctgaagcagctttgtatagaagcccatcaaacagtgtgcctgtttctctttaatgcatgttacctggagccatcagtgccacctattcctctctttctaaccaaggaaggaaaggatgagtttcactagactgcaatgtgcttagagtctgggtacaatgtagaaccctaatttgaaaaatattgtggtttctgctaacataggggcattggacacagaagaacattgtggaggtgaaacaaattcatatcttgtatgactaggaatctttaagcataatgtaaggaataagagggaattctgtatgaggccaattctgggtacacagtaggcatccaacaaatagttggctatatggttgcaatgatcactcctaagatattttatggttgacctaagtaaatcaataatgttctttagtaggtgccttctgggtatttccataggatatgttgctagctatgtttcttaaagtaaaataataagagaaatatgagtattactccatctttgattctcagtcttgccacaaaataatccctttgaataaataacttggtccatttaatgacctcttaaagctttggaagcatgcctgccttcacctctgcacagttcactgcttaactactatttctctttgcccatctttagagcaaacacttcgtagaatgaggcagtgaccctgtaatgcatgtctgtggccctctccaggctggaacacctccagctttttactatgtattattctttagaggtttgggtgttttcccatgttgcttttttgggtccctcctgattcacattacacaaacactctccaatatcaagaactcaataaaattctcttatttgaagttgtaattaaaatcaagagtgaattttattgaaaatgttgatgacaatgtatgaaggaattcaggaaaacaataacattgaatgatggtttccaggtgctattcactcttccttagatactgtgtttctgcttaacctaacattgccaccacttacccctaccagctgggattgcagggacagggtatgaagggcatcaaattgtgaaaggaaactgctcttcctcaaaaggtgatgtaactgccacagttaactaaattacctgctcagaaattaatgatgatgatgatgatcatgatcataaatacatttgctttaattgaatgtcagagtgttgtctacttgcaaatgaccctacagctggtgacatgttcccactttgctgagcctcaatttagaattggtcaagtccctgcacaaccaagccaagcagcttcctgtgtacacagtctttacttccttgaattttccatcttatgtagtaactattgtgagttttcatggctgctttatttggggcagtaatgcattatagtggtgtcacaaattggggacttctcttaggactcaatctccttgtgaatgccagtggattactgtagtttatctttactggtaagaaacactgctgatgaagtcttattcagattgtgttttacttagcagaggtgtagttttgctggtgaatttggttaattcttcagtcccactaactgttgcaacaaattccaatttggcaaattgaatctgaaaaccacagttaaacacaagtctccctcagaggtagcatgtcaatttctgctgaccccaacaaaggttctttccttttcaaaacaacttccctttttttctcagttggttgggcactggacacctatgtcatccagaattgagtctctcttctcagaattatcttcagtgactgtcccctcctcatttgttacctacaccggatgtgtttgttcttttcagagtgttccaatccaactaaaatacaacaagcagccacttgaagtgtgtgtctgcttgtgttaactatataaacttcatggatgctaatgttccttttcttttccttcttaatgtccatagaaagtgcctatcttggtgtggaatgttgaccctttgtgggagagaaggaaggtgagatgaaatctggtttctccaactaacactcctggtttgggagccagcaaaatggagagctattaagaattctgacaaagggaaacattcatgcccaggagagctacagattagaaaaaaagactagctgtccaaaatcatcaccgtttcctactttaagtcaaagaagtcattgtgcttagcttaagcctcatgtgcagttcatttcactgaccctaccttaattctggctgaagaatatttttaataacttggtatgtttgggagtcatgtaaggccaagtttctggatagcctcagaagagatgaaacagtaatgaaatgcttgaggaactcaaggggaaaaaagagccttaaagaaaagtgccttcctttagacctgtttaatataacccacctagtcattttagagagatgtacaaagagatattcaaaatattctgaggaaaaaaatcagtttttttttttaattaaagcctctagccagtcacttcaaattacacagagagctcctttatatttgtttgcaagctagcacttaagtcaaatggagtgcaccaattcattctcacctatgtggaaaggaccaaaggactgtgaataggtcacagtgtggtctgggaagtctagccaagggtgccagctggtgggaagcaagttgattccatcggtgtgtggaatgttttcttgaagaccagagtggggtgcaccttcttctagaaaccctgctctaactgtgccctctccagaggtcccattgccccttgctagcatagcactttgaaggtgtgacattctggaagctggtcttcgtagttagagcatttcagttgagtttggtgtggtggatacatgcaaatgactatgagctttgtagtatggtaaatgtatgcgctttcccttttgcttgtcaatagtatgagtcctcactctccaacagccattcctgagacattctcctgctcttactccagcctctcactagtatcttcactctaattgttgattgtttggtttggagctatgtaagctctatcctggctccagcttttaagcttcttgagggtgtgtcctctacttattttcaaatatatttgctccctgcctgatactgggcactaccagtccacaaataaaacctattgactgactagtaatgcattttaaataagacttacagcaaaatgtcttcaacaatattcagtgatgtaaagcctctagtgtaaaattcataacatcaaattgataaacattttagtcaatgtgatgaagtagaaattgagtgccatttcatataaaaaatgaggtgacaatattgagataaagatctaattggtcactatatttatagacacttgcactactcattaagtgtatcacaagcatgagtgatttagctaagacctggaaattaataaagaacatatgaaaaagacaaaaatcatctgtgtttatctttaaagtcaatatttgcttaataataattacatcttaataaaactcatgcaccatttctttacctgacaaactaactaccaaaaagggggtgtagttggccacctaaagacattagaagatgttctcttttttttctggacaaattttccaggctgaaataaatgataaaggcaggaggtggtatttgagatgcatcttatttactcttaactcctttgtagtgctcacaacatgcaagctgtcttcaagaaacagctgattactgattagctgaaacatgacctcaggtctcataaatctactagttctattacgagatatatactttttgaagatttatttctaactgtgtgagagagagaggggggaaggagggaaggggtaaggagggagggagggaggagggaaggaaggaagggagggggagaaagtatgcagatacctgagaaggccagaagagggtgtaatatctcctggagctggttgtgaactgcctgaaatgggtgctatgaactgaactcaggtcctccacaagggcaatagtacatgcccttaactgctgagccatctcccttgggagactaaagcactgtttgtttttttctgttaatattcttgagataagtgtttcacccagaatctcatggcctgtatttagtgaaaacacttgtagaacaacaactgtggacaaccatacaacagagaaattaactctaaccagagaaagaagtgcaccaaataagcttcagagagcagatgccacttaaaaaggaactcaaaagctgattagggttgttatgcttgcatataaaagtcactctcagatataccaaagaaaaccattctgtaagaacataaaggctaaatagtaataaaatagagtctcctgtccagtactagaatcctggaaaggtacagcctcccccattaggggtctttcaaggactcccctagtttcagtgcagtgtcctctttaagttctttctcatctgaataatataaagtgttcttcaaggagctaccgtttcactgaactccgaggattttgtgagagttaagtgttcccaacaatctgcacagcaatcaatggtcaacatatgagtcaccatgtagcaggatcaaacaagcctattcataaagacagtcctcctgtgtgagctgtcagtgacttcagccaacagtcatgccttatttgtgagcagtgccccaggttcctgctggtttgaggaaaatcagcctcttgcactctttcaatctcatgattagagagtactgctgggccagaaggtgttgctttaaatttgttcagtaattctcagcctagtgaacatgagagatcctatttgctttttaatatgttggaaagtataagtgtacttttgtcctttctgaagatggtggtaattttaaattcaaaatattttctccaacactattgtattttttctaatgggaacacaaaataagataatttttggtaatgtaattcctattcaagatatcacaggctcttttgtcattttaaaaataaaaactaaatctcaaaatatttttcagcatcctaagtgatgataggatttcaagggtccaaatcagaatttttcatgggagcaaagctgctacaggagttatataataaaaataaatgcatgagtatatcaaatacattttgatagatgaatataaataagtaaagttttacatagtaaattttattcagtcacatctaataatcaagttgttttaccatgacttagaataatataaaggttgagagaaagaaaacagttagtggctaatatgctaattaagttgacaagaatgacaaaatttattttactctttcatcagagataagacgttataagacccagatatattttgtcttccagttgaataatgggaaaaagaaaagttataaggaatacagttgttccagtcattacttcagtctaggacttggtaagctttgaccattcttaacacagaaataagacttaatcatctgtgcatacagaagctttgggcacttagccactaggcatctcctattttacagatctttgtttaaaaattgatgatgcactgagcacaagacagcgtttgcatcccattgaaaactacttggtgggaacctatctatctgaggatttcaaagcacaaagtgacattccattacactttaggttgctaatattgactgacaattgtacaggatctgttacccaacagcatctgtgagcaagttatttagtcccagactggaagaaaaagaagagaaaatgtatcatgcagtagcattcatgtccttgtatctcctaattgtggacacaatgtgactagtaagcagtcccttgttcctgttgccctgttatgattggtgctgtaccctcaaactctggccaaaacagactcttcctcttttaagttgctgtgatagataattttaactgtcagcctgacaagttccagaatcacctgagaagggaattccaatgagggattgtctagattaggtttcctcataggcatgtctgtgtgggattttcttgattactttaactgaagttgaaaaatttgcctactctgggtggaatcattccttaggcaagggaatcctgaattgtatagtaggtaaagcaaattgatccttagcatatatgcattcattgctttcttctcttgactttggaggcaatacaacaagcagttttaagttcctgcagttcaaggatgaactgtagcttgaactgtgagccaaaaatttaagttgctttgatgagaatattttgtcacagctgcagaaaaagatactaagacagtggtttttgtccattattttgccaacagcaatgaggaaagtaacctaatacaacagaaagaattttagattagaaataacttagtacatttatgggaataacacccaattctagttaacagattttcagaaaagtcttcaaattgcatgtatattttcattgtctggattgtaaagcttcttcaacactggttttccaataagacagttgatggctggctagtggatttactgttataaatctaacttagaagaggctaattggctaaaaatatattgccctcttaaagtaaatgcatcaataaacaatattttttaaaaaaacaaccctaactcttgaaattttctaaacctgttaactttgtagaagtctttcccttgcactcaagagtaatgtgggcagaatgttctgttccctggcattccctgaattttggaggctctgctggtttcagcatctttctcacatccatgcccacacccaaataagattcctttttaacctgttccagctttcaggaaactcaccacagctatctaactatgcaaggtataatgttttgtagttttctagataagtacattttttccttagagaatttgacttattgagcatgtctcttgttgattaatatccttttccttatggaggtgactttaaaacataactattgtattcgtcaccttaggagatgaagaggttaaatgtgttcagcttttgagttcaaatatggatgttgtctatgtcatcacgttgcagggcctgtgctcactctaatcaatagatactaaacaaggcacccccataattatggaggttgattctcacaacagctggaaaggtagactaatgacaatgctagagcaaagttgatttgggacacacttaagaatacacagtaagtaggagaacctagacaaaaaccagatttagtcttcattaaaatcagtgttttttcactgcaacacattgaataggcatagagagtacattatagagacaatatgccatttgtaccacattttatagttcattatattttttttctttcttgttgctacaggggatgttaaggcaacatctccttaagtaactcaggctggcctcaaattcatgaaaatcctcctgcctcagtcgtttgagtgctaggcttataggcatgagccaccaggcctagtgagatttatctctttttaaatttcatttttattcaggaattaattagaattccatatactgagaattcaagagtgagttttagacttcaggaatgccaaattgaaattgtaacatatgttcccatgaaaagttagaattttgctcagtgcagtttggttgctctcctgtagagtaacttaacttctcatacatcatgtgtgtgtgagaggtagggcataaagatgggcacatccatcctgaaactctcttcctgaaagctgcacgtaggcttcccctgcttctggagtgtgttcccagtgtctggactgtgaagtgagtacagtaaagacattatacaatgtgtagcacgcaagtgataacctcgtgttttgtctttagggagatgggaatcatgacaaattgatcatgttgaagacaatggaggacttattgcttctctgtagaatgggcaaatgtgtgtatatgtgttcatgcctacatctatacctatattgtgagttcaataagaacttgatattgtgtatactgtttctgtacttcatgtgaatgtgtagctgccaaggtgcatcccagtagaagtcagtagaaattttgatgtcagggccaatatccccttttttgaagcagatgtcttgttcttcaccactgagtgtaccaggcttgttgtcccataggcctcagcatattctcctatcctcatcttgtcacaggcatgctggaactgcaggtgtgttgtactacagctgccttttctttggttcctgggagcctaactcccattctcatgttgtcatgataatcactgtatacactggaccatcttcttaaccccagaacttgatagttttaaaaaatgatattgtattaacttatatattaatataaatctactagtgtaatatataactgatatgcatgtaggtattctcacaaatgccacgtttaaccccaagatgatctcttccaaagtgtgtgctactaaccattatgttttattgacttgcccatctttctgataacaatgattaaagttggaaaagtaatgcacacttaggacagtctatttaaagacactcatgcattagtgttcctcatgcagctgacattttttggttgcttctatttatttttgagcttctggtctccaggttttatttaacctttgatttaagtatatagggacctggggtaatacaacacttgagcctgaaaggtgctgtttgtatttacattgaccactttaataaagttgtgctgggccttggagatgctcagaatgattttcagagcatccattttctgtgctaatcacatattaacacagccccaaggaaagaagaactctagagggaagggtgatttggattcacttcgttccactgggtttttaagttgtcaaaattaaagccatttgtaaatacacacaaatgcagattctatctgttcagctgcaccttttagtttatttcccttttaaatgaaagaaagcacaaataagcagatggaaacaatgagcggttgggcattctggtcgttcagtaatatggagcatccatacacttgttcattcaggcaccttttttgcattccctttgtcactgtgtctttgcggcttgcaggcaccctcctccaccttccttgtagctctgttacctcacctggcacagacatcctgttgcttcaggagcaatttgatgcttcagtggttggatgagaggactacgtactgatgggttgacgcatttattgattttgcttcaggtataagcaggtctgtatttcaatttgtgttctggtaatactgtgtaagttgatatttttatgctttaattttcttgtatacaaatggacttaatcatattctccccttcacagaggtcttattaaattacatactttaaaagcatattagcatgtagtgcatatcctcgatacctctttaaatgggctcttgtggattcatttacattagcacgtctcaataaagtctacctgacagtattatttcagtaaatagttatttattctttgagtgcttccaacatgtaacctatgtgtttggtctatcccactctctgctccctacttcttctatcccagctgctttaggatcttattaatcttatatttaacataatttctttattgattctttgggaatttcacatcatgcaccccaatcccgctcacctccaagtccccccatatcctcccttcacccctgcagcacccccaagaaaatatttttaagtcagactaaaacaaaactaaacaagcaaacaaacaaaagcaagaacaaaccaaaccaaaagaaacaccaaaaagacctcttcaattatccttctttcccacctctccaacacttcctcattggctctgctggcattgggagtagtgtgttacatagtagactcttttgtacaatcagctttgctagcaaatgttcattgcaatgagtcactggtctggttcaaggcttctggtttctggtacaccatcatcactgaatcctcactgaaactcctctggagcatccggcagatgccctgagtcatagagatcctgcatgtattgttccaaaggaccagtccttcatgagctccagcaaaacctatatgggatagatgttaaggtgggccaacctaaggcctggctgtgggcctgggtaacagatgagctggtcagtctggaccataggacagtctgcctcaggcaagggggcagaaccagctcccctaagcccatgccatcaggatcagttctacctcacctgaggtgagggttgtagccacctctcttgctgcagtggccaggtgttccagggccagcaaagggtggggccagctcagcatggctctctgatttcataggcatgcttcctatgccctttctgaggtgacacaggtcccagacatcaacacagatcccacctactgctggacctcagacccaaatatggacttaatccaacacactgcagtagtaaggccatgaatccagacacagccctcagctgcagctggtccagctgttaccatggcattggatagcagaacaggccactcagaactgcacggcctccctgcagcatagccctcagattccaacatggtcccagacgggctgatcagaccctgagcaactacatagcctttggttgcaacaagagtcaccgatgttggcttaggccctggctgttctagggccatggacccagacatggcccttggcagcagccaggacctggacaacaccatagacctaggtgatagcacaggtcacccagactggcatggctctggtggcagcaaggcctgcagacaccaaaaagattgaggcccagaccctagacttctgtatggcccttaatggtagcatgggccacagacattaatacagaccctggctgctaaagggccacagacccagacatgggtccctggcagtagctcaggcatagatgacaccatgacctcaggtatcagcacaggctaaacaaatcagcatgactccagtagtggctcctgaaaagctacaaggccacaggtgccagccaagacactgagcatccttgtggcctttgtcttagtcttacaactgctcacttagccatcagggctctatcagtatacaactgcaaatgtaccatataatctattttaatagagataatttaatatagaaattggctaagcagctttggatgtgccaagaaaggggtcttatgcatgaatactgaactcataggttcagaaacaggcccacattcagggttaattcaaaggaaggtgtggggtttataacttagatgctcataacagagggggacttagaggtctaaagacaaggtaccatctggcttctgtgagtatctgagacccatgaggaaggagtgaagctcctggtgctgaaggtatgatgaagttgatcttaagcatctacacaagctgattagcagaagcaaaagatctgttcagctaaagttacaaggagtgatcaccctgaaagaataaacaagtaggcagaaataggcaccacttctctcttcttgcctgctagcctctcccagacctctcattccaaatgaaaactggcttgcagctggcaaaagacaggtatgtgttgttgaataaatcacaaggtcagtatcagaaaactgggcagagagctgggtttggagatgaggggtgatagcttagttaccagcacaggtttcccctgctcacatagcttttggtttgactactgtaaacatttctctgatcacatgaacatatcaacaagatgtttgtgtgttcacacaatttaacatggtccaaagcaaacacaaaccatcccatgtgagaggcaggagatggtcctctggaggaaggaggtgtgttctcactggtagggttcagaagtttcaaagataggtaagatttgacatttaaacagacagttcctgacttaacaccactccgcatctttatttccattgcctaagaaatataaatatttcctatacatcttctatacttctagtttgatattgttctcatgtcatcacttggatgccttgtcacacctaggtgtgcctcctatgtatgacttgagctgatgctaaagatgaccacctcctagatcctgcaggccagcatgggtagcagctcccatgaaaagccagagtaatgtgaactgttaatcatgtctggtgcatggaaaggtggctgaacatactatggtaacaaggtaatcaaatttagtttgggtggggggcactcaggaagttttcctgggaaatgataggtaaatgttagaacacagataaggaggagagggataatcttgtccatgtaaaataagtgggagatcagtatgagtgttgagaaagggggtgcagatgtcccaatgttttcctgaagcatcgttagtctcagattgcacctcctccacgaaacctgtcttaactaattatctgaagtggccgctcccttttctcagcttttaggtattcttgctattcctgacatacattgatgtggcttgtaatcaattccataaaaagatagtgacctgagcttagggaaagtttctagaaactaggatttgtctcctaccagtctttgtaactctgagtgtgttctatcaactatttgctgagtagagcagcaaacttttatgtctgctactagtaagacaactcattcaatgaactgttcttttatttcacttatagggcactttgagttggctttagaggtgattggtggttacttgatgtatgtagagcaagtgaggagatacaggctagcccacttggggagcggtccagcagtgtgggatttgagacctgtatctcaggcctctaccaatcactgtgacaggctacctctttcaaagtttcagaaacgcgaagctaaactgctcagctaactttattgtgttacttaattttactttcagtttgcccttgcatggtgttttacaaggaaaagatgggtgttaccagcacaaactcttggacaacttagacagagttggcctttaaagttaagcatttctagagaggagggccagggtaaatatcacacccagcgagcttccagtcctgtgtcctggatctgcttgcaatagcataagtgaccccaccatctgtactgaggaactagctgcatgttctctcatgatgtactcattccctggggcctaggattcgattggaaataattatgggatgaaaactttgaaactcttcatctgagattactttaccatagtgttggaattaacagttagggaaagactgcctgctatgacaagtagcactgggttggggccgcccacttattgcaaagatgacccaggagttctagtgagtggaaatagtcatttaatatagactataaatatgactaatgtacacccagagatgatatataaaattttatgccaaatgaaggagcatttgtgtgagaaaggataatagaaacagctggaaacattttaaatctatagctatgtaaagaggtatgagaacagagatatctgggcaaagttgagatggatatgtgtgtttacatgtgagaatatatgcttttatttacaaactcctatctggtgccttagctttcactagtaggttatttccactcccgaaaatgaacacacaattttgtccccactgttaaaacatctgctttgttggaacatgttggcaagttcagcagtgtggaagtaatctgaaagccatatggtgaagttcaattgatgggtgatgttatctagcagtattcctttagcagttggtaatcgaaatgttttattatctcagtctatttttgtaaagactttgtgacttgatggatatcattatttcacatcaataaagacatttagaggtacgcatattttccagtagcttaagttatgtgaaagggtgtggtgtatgtgtgtgcctgagagagagagagggagagagagagagagagagagagagagagagagagggagagagagagagagactataggatatgtagggggtagtttgtgagtaatgcggagcattctcaaacacaatcaatgacctagattaaatgctaatctgtggatccttgagcaaagtttctacctaagtggtgtttggagaaagggagagttacttctggcctgcagcagataactcccttatggtggttcttcattttacttccctagtatttttctggatgagcaacaactcactctgtttctgcttgccctttctctccctgccccatccaagttcatttcatttttgtggctgcatctcactcaagagaataaatgcccactttccttgtgtcacagagcaaggcctccttttaattcctatttgtggactgtcttctgagggacatgaacctggaataaacagcatagactctcaattcaagccagaagcatcatctcccctatggtttaaggactggggtggaacagagaagacaaatgcttcttggctgtgactcagatgtcagtactcaatcctcagagtaactggtaagggctggagaaaaatgtgtatggtgttagtcttacctgacccacagcagagtgatccacacctcatcctcacccctacccatgctccttttgcagattagaaaactgaccctgaaaatgtaaaggtattttgcagggtccctgagcaatgccatggtggagactggactctaacccagattgtcatacattttgagcttcttttgggtcttcttaaatactcagggagtatttgggccccttccagtctcatggaatcctctttcttcagtatgttctgttttgatgaccaccagaacaccaaagttgctaagaaaaaaatagaaaagtaaaattaattaattgttataatatatgtgagcagtctgtaaattataagaccttacattaagttttctgtgttgataactgttgcaatatgctcatttgcatgatccacttatcattcacacctaattaccaagcaatacaataacaattatgtggttaattaaatgcacactggatcaactgtgtgaataattctaagcccccttctcttagttgccatcttcacagtgtgagccttcatttgaaatgcaagttatagaagtgaaggtgacatcgtgcttgtgagttggtccttgacttttctaaagagaaggaatatgtagagttcacagtccttataagctccacggtgtctgaactgaagttgcctttaagttctcaccaggagagtagccagcatgcctccatcagtttctgcacttgacattatttgtcctcagtggttctaccatctatgaatttgggttggttcctactcttgccagttttctccaaaacaactaattattaaaaacatcaaatgagcaaacacgacttgagtgaaacaggatttccaagccacactgcagaataggaatgattttgtgtgtgtgtgtgtgtgtgcatgagagaatctgtgcactgctgtttgaagcaattaagattaaaagagtaatttagtccttaatattctgatatgtgctttcaaaacaatatccaagtaaacagctttgcttttgtatgcagggtccagctatgtaatccaggctggctccaaactcataaccctctggatcagtgttccaagggctgttattacaagtgtgcactagtatacataacaaaaggaagagtttaattgaagaacataattcatttaggtttctaaaaaagaaataatcatcactgatttgtgagtaactcatacttgaaaataattcatttagatttctaaaaaaaaacatcactgatctgcaagcaagtcatagtttccattatttttaaattgtctgggttggtcttgattttggaactgtttgcttgcctatttttaatttaattgtgcatgcatgtggaggtcaaagatcaatgttgcctattttgctctattgctccaccttcatttttaagacagaatctcactgattagctagggctagtgaaccccttgggatcctcttgtcccaaccttggggttgcaggcataccacaccacaccacaccacacccaattttttccatgacttctggggatccaaatccaggtccccatacttacatggcaggaaggaactttacatgctgagccatctcttcagccctgtagctgtcaatatttgacttttataaagggttatgtgacagatgactggctactctagttggaagccgaacaaataagagaatgtaacaggtatgatttgctttaataaaataaagcaggcattaaataagttcatttcaaaggttggtagtgaataaattactttaagaaaatgactgcatgaccatgtgtcttcatggaaggttggggcatcttgatcactaatagggaatttgattgctgctgaagatccatttattgagcttttgactatattttattttatttgtgcttttgtctatattttaaagtcagcctaggaacttacatctcatttaatctttcttacaatcctgttgtgaaatgtgaaatacagcttgaattacataagtaattgcctgaggtcacacaggcagtacatagaaaagatcatattcactgccgtgagccaatttccatgatatttatactgccctagaagttgggcatgcacacatgatgttaggagggattagatatcagaatagggatacacagagacctgagacgaagcttcacaatcagataaagatgagtatctcagtcaaggggcaacagtgataaaattacatgggaagatgaatacaccctgttgagtaactcatttgtcttcacctgatcagcatcttcagggttttgcaacccattcatatcacacttaatttgatttccccctgaaatttgctgtaattgagttttccttccatgtcatggatagaagaggcaagtaacaagacagctggtaagtattaactagtattgttcacagggcctttacaaactgccaaacagagcagggagttgaaatagccagactgtgcttcagtgaatttggggatatctcaagtaaaatgcagaaagtctaaagcacctgtggaggttttgtttcaaatgtccctagggataaaattgtacaggagtctgaggactgatatatgagatattactatcatggttggataaaggaaagaaaaaaaactatgataaacaaaatgaaaatggtttatttccttaaagctggcaaatatgtagtttattattttatagtaagaaggatttagatcatataaatcatgttccattctctcaaaaggcaaggctggatgaaaataaactattgtcatcatttgttggttgtgtttggggattgagcagacgctagtctcaagtgttgatgcaattcagaatttttattttccttgagtccttttgtagagaactttacatagcagttgctgactatgtcatggccttttcattctggatgaggtttgggcagaatgagtggatagggaaatgtcttttgagatgggcacataaaatgaactcgtgcctttatctgacagccaacccatcttctcacaagcaatctgctgctgtgagtggaagaaactagagatccccctggctcagggcagtgggaggtatctgcctgtggcatgcaatttaaccaatgtgtaaaggtccttttgcctcaaggggataattctgtctatctccctgttggcttatagataatagatatcactgtgcacaaaattctatgtagcaaacaatgaccactgactatgtgcctaatttctctatttttatggatatgaaatccatgtgctcttgtatataactttcaggagaactcttcctcctattgcaacttaaatgccaaaaaatattttagaagtttattgagaacccagtataactatgaacaatttaggatataagagaaaaaaaagcagcaatatcaacttttaagattaaaaatttaataactcaatttctattgaagtggcaggagctacaaattattcatcttttttctctgacttgtctagttgtacacagatgagaatttggccctcagcatgtttaactaccaggaaagagtaaaggaaccctaaacagagtggagtcatggtgtgtttatgctttatgagagagaaagcagcaactagcttgtgggggaaagaacataaaagaagcagggttggaggagcccaggcaggccagagttcaaggacaggaagatgaatgaatctaagtcatagaacagtcaagggttaccagactgcattttaaacatcaccacccctgtcaatatcaccttctctctttcacagtaggttctgcattctttaatcaggattttcctaaggtttcccaactctctgcctctgtagggtgcctcatctagcttttctaatgaagcagccttccctctgtcatgggattttgtacctgccagttctctttaacatgcatttactttactggggcattgtggggattacatgagatcaagcatgtaaaattttattcacaaaagtaacgtgggctcacaaagttgaatactctatggcccctctgatgtgtggatccatgcctctattaggtgtgtcagatggctccttttatatgttgataatggccagggaagtagaaaggggctcatgaggctggaaaatgagaggctttaaagaggggattaagacaacagaacagaatggaaaaggggaactgagagtataaaagtaaggtagggaaagggggacaagctgaaggggtgggagcaggggattaaccaaaatgaaatatgagtgtgaaaatcccaagtggaaacctgttgctttgtaagctaacacagcaaaacaactagcacaggatttcaacttcctggaggaccccattaatactaaccaatcatttcaagacaattgtattttcagtttacatatttttaaagattcttaataactaaaacttgaaattagtgtgtggcaaagataataaattctacagaagtgctgaagtgggtcacataaaagcagagtcagggaataaagagagcgcttagtgtttaagagcacttattgctcttgcagtggatcggggttcagttcccaccaccacatggtaacttacagccctctgtggctctagccccaggtgatcagatgccctcctctggcctcagtaggtactgcatgcatgagctgctgcttacacttttgttgaggcaaaatacccatacacataaaaatgttaaaaataaaataaaagcaggttcaattcctgtgaggagataacagagttgagcatctggttgtcagagagaaaaatcagggaaactcccagtgatagaggagatggcagaagacagaggtaaagatgtgtcttgttaaaactcttatcctctgagcttctttagctgaggagaaccctgataacagtgtaaaaaaatgagctaaaattcttaaatattttgatggcttctcctctgtgctaagtttgacatattttaaattagaggcctttctgacaaattgcttagaatctgagctttcatttctttggatcactttactggcttaatccttgcattgttgatttgctctaattttatctccttcaggacttttccatgacagctaatttctgtaataatgcctcatgtagaaccacagaaaagtctcgtatgatcattgccatttctcttcataagcatgcaccatgagactttactatactgttgatcaaatacatagcacaaaattttttcctaccaagttccagaggattctgggttttctccctctaatacttaaagctaactctgttttgtgccgccttttttgctgtggagtctgagtgctttgaatgactattacaagtgctaactgacttgggtcaattcagttcactcatttctgtttcaattttaccacttgctgaatgagaatcattgccaagcaccattcctccagggagacaatgtacagcttgacatgggcttgataggatgtccagaaatgacatttttaactgctttatagatcccccaaagaaaggagatttcttttgacctagttaacaatttctgacctgctttgtgctattgctcagtttgtcatggtttttgcttgtgttttacttgcttgtccttccttcctgcttcctggaccactgtcaatttaatgctgttttagacaaataaaactgatgaacagaaattggattctttgctctcagtaaccagaaatatccactttaagaaaaagcttattgcaaagatggtgttcaagcatcagtctgggattttattgctcaggtttcgactcaccaaaatttgttacctgtgtctctaatcactacttcttttaaaggatttaagcttcagccatccgtagccttgcacatttaccatattgaaggaagaaggttgctgtctgacaaacaaatataaagaacttcagaatgcaatgagtcaaactgtattttataactcaatatcataccctttaatacttaggaattaatcttttcttctaacggattcagttgctggcataagtgatttaacattaaatcaaatgtaattggattctatgtgactgtaggtacaatttgacccaagttattgcatttgataaaagaagcaactgtgctgtcttgtttgcaagttgactgcattttctgggaattaaataaggtcaacagctccaggggcacttcctatctggaacatgacatgctttcagcccacagagatttagaagcagtttttaaaaaacattttgtttagtgttttaattttagtgaaatttgatggccttagaaataatcgagtatcttcaagctcttgtaaataacacagaccctttccaataaccaggcttcagctctgaaatcctaagcaagttactgaaattatccaaggctcagttggcgcatctataaaaggagttaatagtgtaactttttatagagggagattaagtgagataatgaatgaaacatcctttgtgctgggcctggcacatggatgcccacactaactatccgtacttatcatcacctataaagttggtgaaatgaattcccattatgggctccagggagcctaatcaaatcatagtggtgtggtagaaactctgggcaactgcagatgttagttgtagagattcttagatcacattttttcatatgaatcctttgtaaagcacattttgctcctgtagtgcctcagttggactggcctcactctgagtgttgaagagctcagaggagcctccctagcagacagttgatggctaagtgctgctttcctgctccaagttgagaacctggtctacagatgaaatcagctagaaaaagagactctctgggtctttctgtcggtgtccaaagctgtgaccaacagcccagctttctgttgcagaaggagagaaattatacatgcatctctcatcccgaaagagccagcatgtgcaagcatggtcagtcactcttgtgcccttgtgtaaatctggaagaactcctttctgcagctttacatgaatccagtctctctagattatgaaaactcaaacaaagctcttagtgcctgaaattgattccaccgatttcccaagcccaagaacttattttgaggcagcagtgtgctctcgtatcatagccttgagaaagcaaagaaaacacaggctgatgaaagagcagcagtaacagactgaacagctgtactacaaacagcatactttctagcatgctatgcaggtcatgctccaataatggtttacttagatatgcatcatccacattaatagaattgggttgtttaaggctttgcagaaaaacaaaacaacttatttagaggattatttgaaaatgaaggtcaagttttatttcttggaagcatattagatatggcagcattaatttgaatgctagacagcattagacagatttttcttaaaagccactttcttcttatattctttaaattcaaacaggactggggagatgtttcagttggcaaagctcttgctttgcaatgtgaagactgaatttgcttccccagaacctgtatcaaaacaaacaagcaaaactggtatatgcctgcaatcctaggtctggggaggcagaggcaggaggatccctggagctcactggccagttattcttgcttaattgggaaacttcctgttcattgaagaaccccttctcaaaaagtatggaaagcaatataggaagactctcaacattgtcttctggtgcatttgtacaaacacgtgcgcgtgcgcacacacacacacacactcagtaaaactcagacacattgcagtcaactttcctttacactattcccaataaatagatattactgttagttttaaatcatttgtatgtattcattaaggacatactatgtactaggaattgatagaaatactttatatattatcttatttaatctacacaaaaatctagaaattagacattattatgttcacctatatatagcaaaatagtcgcttaatgaagataatatccaaccaaaatctaaccctttattatgaaaatattaattgacagagtaggactcaagctttgaaaatcccttgtacatatcttattaccaagtaatctaaaaatcagataaactgggttcagattctagctctaataattgccagctaggctcagtgaggggtctcagtgtataataggctagctgtgcaagcctattgacctgagttccatccttgtatcctatacaaagggggaaagacagaactaactccaaaaagttttgtcctgtgtgtgccatgatatgtggacctatgtactttcagacacccaataacacataaaatttaaggaataatcactaagtagttcatttaaaacagatggtttaactccttaaatgtaaatttcctcctctgtaaagtggtaataataattgagaaggaaaaagtggagcaccaagagagagaacgggtgtggcacacttaaagcattgctgaggcatagaaagaccttaacacaagtaattttctattaaagcaataactatttgtgcatttctttgtgtgcttatttatattctagagatgaaagccaggtagaacctaaatgcatgttggataagctttttaccactgatctatgctttcagccgaatgattgccatgaaaattgcttcccttcattgcacaggggatctaaaacgtttgctccacgaggtttaagagcccttttccttcagctttaaagactaaaaaacagaagtgaatgttggtcaagtatgatgttaaaggagtacccagtaaccctttccagtggctgactgccctctcatgacgtgtgggggctgctcaccttggcactaggtatctcaagccctgaaactgtctaaggacatgggacctgagcagttgagtgggtttatgataaaatgtttctattaaatgaggcagatccataatatgtaatgtgatggtctgtaaattttcaatttagtttgctattcataatttaaattagttgaggaaactgataaaagtttaaatgcaactactgaccccatttcagttttcaagccagctttaatattttttgaagtgacagttcatcagctaatggagttactagtttatcaacaggatctgggtctgaggtctgacattcctgggactccgtaaatgtctccagacacatttctgaagtttatgaaaaatgacagtaaataggtttctgggacatgtctccatcaatcatgaagaaaattttctttattaatatcctgcaattatcaaattaatgggaaggaaatatccaagtaatttctccagagacacttcaagatgcatgttaaatttccaaattttgcctttaaaacataacatttactttcttgatatatgggcaacaagacaaactgtgataaaaaaattccctacaaaatcagatcactttttgtcataaataaagctttcatttgccttcaggtgagttggaagaataattttcacggtgttttatcttgggatcataaattatttaagttaatgaatataagaatataagtttgaggtggtctgtattatgagatacacacattttaagaataatattttattctttgaaaacataaaacatttatgcaatatattaaccatattcatctgtcattatcgccctctgtctcccctttgtgcctccctcttcatctccctccctgtgcgatgtctttactcatttcctctttttttggtattattaataacctctgagtccaattaatcttgaccatctagacatggtgtgtgaccatctactgggccattagcaacctacctgcatccccaaaggagagtgactctgtctctctcagaagctttgaactgccagtagctcctttggtggagtgtggtctcagggctgtcttctctatccatgctgggatttataccgattaatctcatgcaggcaaccacagctgctctgagctgatatgtgcacagccatctttcgtccaaaaaataaacccccttccccctagcaatttaattaatacatgaatgttaaaaaaagtataagcatttttggttattttatacctaccaagctttcttgcaaaaatatgtgttcatctcttgtttattgtgttgttcatgaaagtaatgtttttattctgaatcattacaggaaaataccaaacaaaatcacaactacacaggagtctgtggagtatttgcttctaatacagaacataaagaaatatatatatcaaccctagaaaagtcacatcaatgtttcagtcctaaagttaagcataaaaacaagatgatcttcttaaagcaaataattaaccatttgttaagggagctaatttttattacacatgaggtggcttaatgggctattttaaaatgttctgctaaagaggaagtataaaatgttcagggatgaggctggaggatggctcaatgagtaaattttgcttcagaaacatgactccccaagtttggatcctgagaagccatgtaagaaacctagcacagtgaggtatgaccataacctcagcagtggggagacagaggtaggacttgctgactactcagggaagccaagccaatgaactccaaagtcagtgagagaatgtctccaaaacaagacacagagtgacagagaaaagcacctgatgtcaacctctgacctccacgtgtccattcaaatagtccatacatatccccactcacacttgcatccatatggacacaccgcatacatactcatagacagagaatgagagagggaatgcacacacacacaaacacacacacacacacacacacacacacacacacacacacacacacacacagagagagagagagagagagagagagagagagagacagagacagagacagagacagagacagagacagagagagacctccaggcttgtccagtcaccatctaagccattgcaatgcccaggctaaggacaaagcaaaaaatagactaaagtttggacataatgtggactcagaatgtcacccctagttgtctcgtcaatcttcagctttagatctatagcaccttcttctattggtttcctaactgtgaatatctcatacttacagtatatcaggcattttcccaagcacttgatgaattaaactgatacctttacaaaatggccacagtgtagatactattattgtagtcattcgcagtgtttgatgaagaaatcaatatagacaacttagctgaatggaaggagcccaaggcaagaaatggtgcatgagatccagatttatatagcctcttattgttcgatccttactctagagggaacaggaaatgcctcaagttgatggtctgggattcagtgaggtgagtatctaaccctcttccttcatagcacttgcataggaccagggtcatggctcagagccagagcactttcatgaaatcagttcttcccaacattgcaacagatcagtttctataagcattcatccctttgtctttgggtttctgactgagaaaaaaaattgctgaattagaaatagtttcccttctcaaactgatccatccccctcaaacacatttctaacagattgtagagttatttttctgaacaaccaatcttgttactctgtctcccccggataccagtacaaaaggccctcattgtttcagagcgcctacctggcagaactcaagctctggaaatgacctccaggtctgcctgttagatccatcctctctccatgctgtgccccagtgggtggcctctctactacattttagatcttatcattgccaggcatgatgctcatcttctctagaaagtctgaatcagatgtctccatagttacatctttggagtctcctgaaattgaatttttctaaaatgcaagccacttgggaggctagatgggtagctaaagctacccatgaaagacactcagtaaataaaatgagtgagtgaatgaatgaatgaagaaattattaattcagaaaattggagtagaagtaccttctttcagaattccccctgtgccactatgcttgtttctgaaagccaaccttgatggggctatgtccactatgatgttcctgcagacaaagtgttaagggagaaagcagaaacaatcatcctgttttcacagaaataatagtgggattagaaaagcttcaaggaaaacctgagcagaagactaaagtgcctctgactggaggacacaaagagaacaggaactaagagatgtctgagagcttagacatacccactgcctgaatgcttgcctttctgttaagaaaacaaagatgtgtagttttaaaacaagacatgaatgcttaaggacacacacacatgcttacacacatacacatgcatgcacatacccacatacatgcacgctgacacacacacacacacacacacacacacacacacacacacacacacacacctgcatatggagggcagtttttaaaggtttattacgtgtgtgtgtgtgtgtgtgtgtgtgtgtgtgtacatatgtgtgtgcagttatgtgagcctgtgtatgccagaagcagaagacagcatggagtgatgtcctctcctactctctgccaagacatctgaggccaggactcttgaatttgcattttaacaagcaatagtgtttcttctgtctctctctttaacccagagctggggtgaccatctgtttagaactgccagcctgttgcatgggtgctatgatgcaaactctagtcctcgtgattgcactgcacttttccctaaccaccatgcagtccattcagccccaacaagcaagcttcttaacccctaaattgtgagccccaaatccaggtctgcaatgttagtccattgtttgtctatggctgttcagtttttattgtttgctatctttatatttttattttgttattttttatttgtataatagaagatttcctgggttgtgggacctaaagataaaactgaattactaaatgtttctaaaatattaccaaatgttttgatatttattcaggctgttcaagtttttaatgtgacttttagatatctatattaaaatactttcttcaacactcataatcacattccttggttgacttttaaatagcactgtttatcaaaagagttatttttaactcattttagaactctaaataatttctgttgttattaatagaagttaaatgaataaactttgaatctttgatttaataaatatgagaaacacttgcagaacagtgaattagcttcatgatctctgcggaaaaaagaacaaaacaatccagtctgtgatggaaattgaaactgaccaccctcaaggaccctctggagtctatgaggcactgcttaaatgcaggtagcaaggacaaaaaaaaaaaaaaaaaaaaacaaatagaacacagccacccaggctttagtaggcttcagggtcacagaattcagataccggtggtcctacctctagttttacaaattcagaaagctcgtctgtgtttacaggaagtccttagatgatgatgatgacaacctcactcaatgacagatcacttcctcagaccctgctataggagtgtatgtcatacataaacacttccatccgcacacagaagcaggagggtgacttgaactattcctagagttttccttaaacaaaaccagaacacaattagacagccctatcaatgaataaaaacggtcatttactcctcctataacagttgccttggtgaaggtacagtagtagtatttctgtcattacagaaaacttatgaggctggtgagaaagcttaataggtgaagtgcttggtgtgtaatcataaggaccagagttcagatccctggtactcacatagaaagtctgatggcccgcctgtaactccagtatttgggaggtggagacaggattcccagggctagctaactagttaaagtggttgaattgatgagctttgggctcacaagagaacatgcctcagcaagtaaagtggaaagtcatcatgggaaatcataccaacttctggtctccacacatacatgttttcatgtacacatataccagtgcacacatacactcacacacatgtgaatacacacacacacacacacacacacacacacacacacacacacacacacacacacacacacacatctgtctcttttttaagaaatctgacttgatttgtatatcatttgagcctttgctgactgttcaataaatacaagtaggagctacataaaatctcatcagatctactacctaccacatgtagttgattaaaactcacatgaataagaacaaatatgaaaagcttggggaagtaagaaatttgtgttttctgagtattccaaagcattttatttattgaaatttccatttctgaatgtaagttaatgaatgaatgtattactaaatcatgataacataaacagtagccttacaactatagctttgaaaaattctatcaaaatgaaaccattgcccaattctcaagttaaaaattaaaatgaaatttcgtgtgcagttgtagatcccttagtggggcacagatggaaagacaactttaaagtgtatcctgaaaatgggtttttggttcagagtgtttgcaccaggagatgatctaggtatggcgaggggggaaagccaagcagaagagtgggaactggacttcagaatctaagttgatgtgagtgtcaccatgtggaaacaagccaggaagttaaaactgtactctagtggccttgaggctaagggtgtgttgaagaagacaaggaatacgtttgctttaaaactgtgcaaacaattgttttaaggaaatgaagggatgaaagacatgtgtgactgcatggtctaggaaaggcatttctgggaagctgagtagagatttccctgttagtctcaggacagcagtgctttccatctgctgttgtgatgctgtgcttgcatagctttatgccaaactggcagtgactgatgccttgtaaccacatctcagactggatacaaggcagaagagcggggtctttgatggatgagcaggacattgaaagatgagaaatggaagaaatgatggatgatagggaaggaggaatgacagagtaaagggggataagctataaacaaaagtaggaaaaggaagtagagagacataaaagagaagtaagtacagtacaaaatcctgtagcaagtgctacagagatggcagatggctcagtagttagtgcctgccgtgcaagctttagaagctgagttctgtcccaggcacccatgtagaatgtgggtgtgttggtgcacgtctgtgccagtgctgaggggtcagagacaggtaggtatccagacagtcaacctagcatagccagtgagctctggaaaagatccttcctgaagcatctctctctctctctctctctctctctctctctctctctctctctctctctgcgtctgtgttggtgtgtgtgtgtgtgtgtgtgtgtgtgtgtgtatacacacacacacacacacacacacacacacacacacacacacaagccaagaggagagaaggggtaagaaaaagggaaaatagctgtcccttcccttctatgctggggtggtagcataccacttccctcctttccttcatcttctccttccctgcctctaaccaggcagtagtgccaactccaccaagttcacactcactctcccctggcagtcttagtccacagagcacctaccattagccatgaatatcacattcatttcaggtccagtccttccctttgatcttttgaaacaggttggaagcttgaagtggactgctgggtactaaaggcagaagtagggatttgatctgatgctcctgatagctagaatgacaaagtggagaatgcacttctctagagttacagatgccaccttattcaaaaggaacgcacaagttctctctgtaatttcatgttatgcaaccaagctaatggagtagttagcttatgcctagatccatggttagttataaaaatcatggattcaggcttctgtttatgaatgggggaagttcttagaattcatttgcaagagtcaattgtatgtaaatccagaggtattttcccacagaaataacattacaaataatggttagatttatcatatttaatctcatataaatgcaagatatgtttgaaatagagtaagaataaatgctgaaataccaaaaatcaagcagagaaaaattacaaagtgattgaaataaaaagttgtttcttccagacgtggtagtgcatgcctttgatttctgcacccaggaggcagagtcaggtggatctctatgaatttgaggccagtttggtcaacatagaaagttctgggacaatcaggactacatagagaaaccctgacttgaaaaaaaaatgttgctttcaaattctcacaaattctatcagaagcagaaactgtgggtatgggacagaacaaagaagaaacaatgacttgctgaatcttctctggtccttgggtacatctttaaggggggggctttccttctgcatcgattgcccttccatttgtgccctaaacagaagaattctttgtactgctgtcatagagatagcacttacttttagcatcctacagcatgatggctatttggatgcaaacataaagtggtagggctcaagggttgagcagaatgttgaaggtgctagtgggacataggttggcagcagacattggcccaaacaattaagctttggtggaaaacaaagcaggagggatgtttaggtctagtgggagagagggaatagaaacagtcactttttaagagcatggatcagtggctgtgagagtggtacccaaaccctcactgggcatttctgcaaaatgaaatgcttgcaaacagcactaccacggatgtaaatggccagtggaaaatttttgttccctattttaaggaagttattgttagtgtgtcttcagcttcatcctctcagacaaagctggggcttgaggaatgcctgactaatgatgttaggattcagctagaaattatagtcagaaaaagatctagccttgaaatgttaatggagtccagaagttagtccctacctcttttgtaaaatgatcttatcaaactgactacaaaggatatgtagagtaatgtctcctttgtcctggagagtaactgaggagtgtcagaatgaaatacgactgccctgagaaatgagcagccttgtaataggccagggtttgaaagccctgagcggcatattgctctctcactggcatacgtaactgctcatgaattaggggaatggagttccctcaaggagtcttaaattttgtcccagtttaattttaagccctatttctatataatagttttaaaatccttagcatttgaaatataatttctttgatagatagactttatctctttatgtaaggccttggaggatgttcatttttgagaaccttcttatgggtagctcagataaagtctgacctatggctttggaacgtgtagttcatcccgagagagccaaatgttttcaaataaacgatccttacatacatgtctgacagctaatttggataggaacataattaaataaacatctcactttggtaccaccaccagtggtttccgttaatatttggcctgtgtatagcctcatagtctttttctatatgtgtgtgtactcactgtgtatagtgagttaatatggcatgtactcacttgcatataatgagtagagctgatttcttaccagaagcataacactgacatcttccactataatgcagcagccctctgtgtcacacttctaaagtccacgcgtggaatttcatgtaaggaaacattgtgatgtgcatagtgtcatcccaccgaacactggatttttttcatttctttttttttgtgctagttttagaaacctaaataatattctaactgatcaatctctagttatctgtgatcatttcctaaggatctatcctagaaatctcactgagtgggactttattactctttcaggtttttttctggcactttctccttccatcggcactatgtggaaatgctttatttatttttcagtggattaaaagctgctgccaggacagcacagctttctaacagtattacagaagaattgctcttagggaaattatcccttggctttctgaactagtccagttgtttcagaccgacttcataatattagccttcattttgttatgtcaggttaaagccatttttttatttcaagaattatatggtggagaaccctatggcatcctaacattctctatggatgacaaactactgttctgacatgcttttccctcatgaacatgcgatttcaaagattgtttaaagagtcaaatttgttgtattcaactgataatcaaagtagtgtctttgccaaattcagttacagtcatttaatattttaaagtcattttcctcctcttttttaatctatgtaaagactgtattttaatttgctctttgtgtgactacaaatgtttattgcattttaaaatacctgctactgtgaggcatgctaaacatacatggatattcggagactaaaagccttttggatttgaactgaaaagtcactttcaggtcataagacaggcataatactctatagtagaagaaattgctataacaaaacacttttgggccaaaccaatacacttctcatcattttgttaaagctgtatgatttcagagaactcctgactttgtgcattgagatgcctaggaaaatagctggagggtttttctctttacaaaattcaatgccataatagtcaatggaaaagcacagaggaggtccaaagtcacattaaaaacacatgcctgaatcgtggtgaatgagacaatcagagagggtggttcaattaaaggcacggtatctgtagtaagaaggttgaataacaatgttccctgtaagttactctatatcttgtgttgagatgtacagcttattcagaaagaaaattacccctgtacctttttcattaactcattcagaatatacattcccccagagcctcacatcatgcacttggagaaacactgagctgattctcattaagtatccttatattatggccacagtgtattttctagtgtttaacgtgccttgaagtttaagaaggaaagaagggggagggtactaactaattttattgacaatattacttggttaataagaattatgtttcaatgataattttcttaatatccatcttccaacttagaaaaatagacaaaaagtttttttgttttgttttgtttttgagatttatatttgtaaaattcaacagaaaattaacatcccatggtaagcaaataccaagtgtgtcatacacagcagacagcagtaatgtttgtttcttcaaaggtcgttttcttctgacctctgtgtcggtccccttctgtgtctgacccctcagaggttcccatatgtcttcccatctctaggcagctgtcacagctggcaatttaaaatacctgttctgaaagctcacaatccgaagtatgtctccaattcacatataatggttagagctataaatgattttaagatgctgagtgctgagtgtctctccaggtactcagtattatgcacagaactttgtccagttagaaggaataggaaagcgccaagggcagatggggcagtgtcagtttttaagagtgagagtaaacagagttgcagaaaaccttttcaacccagtcataacctggatacacagtaaatgctctgtcttgtcctggataagacgtggactcccactagacactggtaggatgaacagaagatgtgagggaggagctttatgaacgtgtgtgacaggagctggctatatccaacctgccttacaagggattatcatttttggattagaaaacccaatactatagagagagggtttaaaggattaaaaagaaacggctttattcttttcaccttttagacagagaaatatcacagaaaggatacaatgttactgaactcttttaaaaaggtggaattacaaattgaaatgaactattttaaaatgaatgtcaggatcaagaagttttctttccaattgaaaatttctgtaagaattctaaatctgtatcagaactctgagttatccagatgctttacctatgtgaggatgctagcataaccaactggggtcaaaagggtgccgtcattcatagctttataagatgcctacagggatctagtgactaacatgggtacaagctgtcctcatttcttccccacaatctttaaaatgttgtggaaattgaagacgtgaagaggtttgtgatattacaacctagtttgtgttcctaggggggagtattattaccactgggagaaacactcaatatgagcaatttactataaaatgctaaattaacatgtcaaggtaattgtgtgctccctttggccctgaagcatcagtgcaaattgcatttcacactaattggtctacagaactcatgcacaataaaaacactgagatttattgagctcctttgccaatgtatatacatatatgtatatgtgtgcatatatgcacacacttattttaatggttacaaactaatagataccctagtttacctcttcaaggtttccttttggtggctttaaatacaaaaatagttgttttgggtggaataccaccattgagctggtgacagagttaagtatgtgaaatcttggagtataaagttttcaataaaagctgtactaaatgaccctattttatacagtttctaacatcaaaataaacttcttacttttgtgagtcatctagttcttccaagtcttgttactatagactcatctttttcccccctctatatggcccttcagtttgcaaaaatccctaggtaatacctaagtagtctattttaactcatcagtaattgctaatcaagacttctgaacagagtgggttaaacattgtcataggtactgtaattctggcctaaaaccaaaccctaagaaatacagttagcaatgggacactcacttgagagcaaataagcaactacctgcagtcgttttgcagttttaagtacataacaaccacccttgaggattccttgacctatcttggccacactgaaagtctcaggctgggcttctttggaacaaataacacgagataggcaaagaagcaaagtgagctttcctacctttggcaagagcttcagggacttgataagaacttgagttttacttgttcacttggagttactggtgatcatgtgttctgtggcagccactctagtttatgagcaactgcacatatcagacaaggaaacagttacagtaaagctcagtaagtggccagatgacacatgtatatcttggccacagccagattcctccctattcctgaggtatcttctaagattttgtagctctcccctgtggtttcttcctccaggaaagaattgaaaagtttagcccaaagtggcaaaatctcttgtccggtaagaaaacttattttcgagataggcagtaggcctcaaactttgtacgtcagcagctggatgatactgccaaggaccaggttattttggttctctcaacaaagacatctcgtcttgttattttcatgtgcattgatgattgctggtaactcttgaaacctcatgctttcctgtgaaggaaagatgcaggaagagtaaccgtctttactcccaagagaacttagagtctgtgctcacccctgatccaactgttggcagaggcatgctaatactggctatctaaaagaggaatgagtttatttgaacaggtttgggtagatggcatgagtgccctgatgacattagcacttgtgtgctagagacacagctccataagtgtagcatttaccttgcaaacacagagacttgaggtcagtccacagagtccatgagaaatgcttggcacgatgctacacacttgtcatctccatgttggaaggcagaaagaaggatctctggagttccctggacatttggtcctagtgggtgagcttctggatgattagagatcctgtctcaaaggatgtaggtgacattcctaaggatgacatctgaagttgtcctctagcttccaaacgtatgtgtgtacacatgcacatgaacatgtattcacacatgcacatacattaaataaagatatcaagtatcttttactaataaggatgatgaaaggtagcaggggtcaatagattctgaacagtgttctccctaagagcagatatctcaaacatttcagtttcaaaacatttgataccactaacaacacctgacttcatgaatgacttgcttgacaatcagaacagctagacagtacatcccacagtagggaagacaaactgatacacttttaatgaatatataattgtttgtcaccaatggctttcaaggggctcttctgtcttgcttccaagttttcactcaaactcacttattcctatctctaggtacaaaatgaaaatgtccctacctggctgtatgtgttctcctgggactctctcagtggtagcacaagacacagaaagattcactggttctgtttaacacatcttgaaaaaacatgcaagccaaatgagagaaagcaagacttaaaagaaagtcatttagaatcaatatttgaaattcgatcaacacatctcatcagaaagaacaatgtgttaaactttttacacaaaatttactcattatctaacactctcttccttattgacagtgcttcagtggaatcttaaactgtgcaacacattatatttatactcttccacaacaaaaattaactttcccaagaagtaatttcctctactatttaacataatctagtcataacctgagtgcctggggatttactcttgtcttcatttttgggaataaaacctgcagcagaaacataagccaagctttctagggaatcccacactttgcccagtgcccataggacaaaaagtctcattttatcttctcctgattctagccctgacaggtagtgaagccctcagaaatctctgggaacctgatttttgtctcattgtttatcccaaactgcagtttattctgatgtagcatcagtgtgaaaggctgagtgatgtgtgctgcagtcatctctcagagtgacttgtttgttacatcctttgaatttcctttatctgtgtagaggtttcagagctcctctgttcattctttcccccctttaagatttagttttggagctcacggacctcagactgacatctgggaaaccagcattggacctacccaggccccctaattgtgggtgtcaggagacctgagcaatttatggggcctctggcagtgcatcagtatttattcccagtatacaaatagacttcggaagcccattccacaccaaggaattctctctcgtcctagacacatgggagagggcctaggcccttctccaaatgatatgacagactttgaggattccccccatggaaggcctcaccctccctggggagcagaagggcagtgggataggggctggtggggggcaggggaggaggggagcgagagggaactaggattgacatgcaaaacaagcttctttccaatttaaataaaaatctgaaagaaaaaagatgacgttaagagaaaattaaaaaactacaaatgcatagaggatgtatagattgaatttctttggaagtatagcttcctcaaattttatagggataatacctttctgctctcaacaatggctatgcgaatttaattacaaatgtgattctgaaaaaaaaaagatttagttttgaagttattaggggtgggggaaccttacaacttactccttggcagtgagaaggatccagaacttgaagggtataaattattccaattggcagcagtacacttgatgctgtggtgactaatgttagtttttttgattttttctttttgttttgttttttagacagggtttctatgtttagccctgtctgttctggaactcactctgtagcccagcctggtttttaactcagagatcccctgcctctgcctcctgagtgctgggattaaagatgtgtgccaccactgcccagtgatgatcatttcttatcaaagccaggcctgctgtccaaaactcagacttgcacctacataatccaagcactgtcttttcacccttgaaacacttactctccatgaaatgtttttgttgtatctgctgatcatgacttctggctaattcgggttcacgtggacaactacatattaaggtttcttacattcagtgaaacactatgaacgaactatgtgttcacccacctgttgtcaaggtgagagttttaagatctttctcctctctctctctctctctctctctctctctctctctctctctctctcctctctctctcccttcctccctccctccctccattgaatcatctctggactaattataaatgcaaagaatattaagacaaaaattctttctcaaatctccactaaggggttttagtgttttatatgaagaaaacaggaaactgcttattttgagttcacattctcaaatgtgtatgtgtgcattttaagatggattcattctaaggactcttgtccagaagatacacaaagaactactaaattgggtaggtaatgttggaaagttataattcacaacctctactctaaatgaacttcattgccaatgaaatggcaatggcaggatggtgccaggtaattattattaaaggaacacaaataccatggagataaggaaaagaaagatcaacctcggggtcctgtaagaacaaccatgaatctagttcgaacacttctgtgttggctatgaactgagttcatcacttgcttaactttggaaggtgttcattccctctatctgatcaaggtgcagacacagaaactcagatgaagaacaaagagtgctctggcctccacaggtagaagcaagttggttgtatgaatcaagccaatcatactctcttgacctcagacacatcttacactctcaccaagaaagattgaggaatccattaaagacacacatattcaaactcattggcatagataatgaaggagtgctgattataggaaatatgaggtgagcattggctggagctggatggcaagttttacctttaaaacttggatgagatgttaaataccttccattttaatatatacttcttatcaattaattgaaataaaaattctttctgacatccatgactaaaggcaaatggtttagtatgccaagcataggaatcactatattctctaattctagtgaggctatttaatgccctgtttccagttggatggatgtgtcaatttattctgaatgttatataattttaatctctccgatgtcactttcagatggtgaataatcagtgcctggccctgatcaaagctgttatattttcaggtatttgttaaatgaaagggtgccagtcctgagttatgtaagggaagagctgatggatcatttgttttgaataaattgaagtctttgctgggccaggttattgatgaacaattttgacttactggctttggtcacttgtatcagagaaagacacagagcatctttccattggcactctaggcttggaatttgaaagctcaagggacccttcttttgagcatagttagaaaatgcctgagcataagagtagttacacagtctccagtaaatctagggtatttgagatacgactcactaacttattattcacatgactgttgtacaggtttgtaatataaataaggcttagttttgttttgtttatcacatatgtatacatccataccacctggtattgtttaaaaataatgtacttataaagtgtttaccatggtgtatgttacacagtaggtctaaaaataaaattctgatttttataagtcatgtttctatttatacttaaaagaaaaatcaatacacagttaaagaatccctcaattgtgctagcttggtttacattcttttaggatagtctagaaatgtaaagtgatatgtactaatcttttattactaacactctgaaggttgacttttcatatttttcataagataatctagaatcaaatatgtgacaccttgtccaagattactctttagtttattaataggaataaactttgtattcattagtatttttgtctaactcactaaacttcttttcctggatactaaaattaaatcaatgttgaaatattaatcagataaaagcttttgctcttgtttcttttcttctttttgaaaaagaaagctaataagctcaatgacaatacaactaacttggtgacatagcctgaagattttggttaaaacacaatgccctgtttaagttggaaagtggaccatcattttatttttatcagtgcaagattaggaaacaatttcccaggaatcacaatggcactggtctttgcttggcattatctttgcaaacattccctatgaaagtattagggaagagttcggatgccacgaggacattcacattgtaaatggcattttctcaacaccactattttcacagtgaaagaatttcaggttcattcagcaggggataaaataggcgggaagccctgagctctaaaactgacaatgtaaacacctctttcaatagctagatcctgctaaacctgcacatttgggttcttgtattctctgtgaaataacatttttttccataatagaatgctgcttattaggcagagggtgcacactgtacatatttggaggcttagtttaaggcttcaactactgaattggtagcaaagaccactataaggggaagatgggagcataggagggagatgtaaatgaaccagtgtcattcgtagggctactgctaaagcaagggtgtgtttccttttcattctcttctctcactttggttttctgtttgatggggtttttgttttgttttgtttttgtcattttcttttgtttttatagaaagcagcttgtaatgtcactctcctgaattaaacaatcatgtactgttcatgctctagaagaaaaatctacaagatcccagttgggaaatcagcttgtggtttatactcaaatacagcagtgccatactcgcctgcctaggaaaggctacttgtaaacaataaatcattcttcagagctagcagccctaagatgtctctgagttttttctctacccaagaatgtcttcccctccccaactccctttctttcctctgcttcttctgccaggctgacttctctctgtgcttcaaaatgcaactcacatcatctgtcatttctttggctgacatttccctccccacttcagctctggtcaattcctggatcctgcacaagaatctctaacattgaactttagatccatgtgtagatgtctttctctccttggtagtccttcttaacccttccttcctaagcttctggccagggatatcaaaggacaggtgttgcaccaggcacacactcatgcatcaatgacattgttgcatctgtctcttctcaatttatagactataaattccacaaaatgattattattcaccattgtacccagtacctagcatgttgtacatgctccacatgcagtttgctatcgctaggctgttgcaatcatcatgatgcccaggttataatatggtacctaaaagtggtatggactagatatagctttggattttcaatcagactgctgtccattggaatgacatcaagtaatgtaatagatacacacacacacacacacacacacacagagagagagagagagagagagagagagagacagacagacagacagacagacagacagagagagagacagacagacagagagagagagagagagagagagagagagagagagagggagagagagagcagtaggcacggggagtgaggaattaaagagttttgggtgtggtaagtaaccaaatgtgtgtttatgtgtagagcttttctggagactatgcaaacgatctaaaccccttgggttaaattccattacaaaatccataaccaagggaacatcattgattgatttaacctgttccacctgttagtgagaagaagcagcttctatttcaggtcactcatcttctgttggaagcatggctgactcatcagtcatagttcagacaaagagacttggtgtagccattgaagagactgggaaccattctctaaaccctctggcaaagcaccctccttgtcagctcactgtcaagaatggaagtccaattatgagagcaattattgattttcaccttaaaattctccacagttatctacagacaaaatcttttacttcacctttcagacacttgctattcacagacgagaacacgaaactttaactgatagcctttacgtgagagatgggcaacagtcattccccacgattggtagcactcttttctctttcactacaggtttaatgaggaaaatgttgacctatgcaattgatttacaggagtcccaaatctagcactgtgtctgaaagaagttacatagaagaaagttttggcactcttagaatgggctttaaaatttggaaagaaattggatcccatgctatatccaaggcactttttttccatgctgagttttcagttgtgcataataaattattttctatactagttatccctggatcttatgttttgaaagaatggcactactgtattacttgccattttaaaaaatgaactatcctcaacttcaaatagcaatagactttgtgacttttccttgtttgtttgggtagagaatttgtgaatttcttgatgcaaagggtcatgtatttgtagccaggtgttacctggggaagtatttatccagttgctttgctgagaaggaggatctatttgagcataactcatttatgtgacaaattacttctgtcatctgagagtctcattgccctctatggaggcctttattcaaagatcaaggggattactctaacatcttttaagacctagcatctgaagctataagttgttattttcatcatattttattgaatgaagcagctacttatgttcattcacattaggggtgagtaaatggtaggaataggcactggcatctccgaaatgattggtattgtcagaagagtgttaatatctcatgtagtaagagcagatgtcctgctatatatatattgccatatctgtctttggaaaatttagccaaccacactggccaagagtgaaattgaaaaccattattctggggctaagtagtaaacaggatatgaccttatttcagaaaggttatgggctagcagaatgagaaaagaaaggcattagtggtcattttacaagctgtgacccaaaggtttaaaagctcagaaaagagaaccatttggaattgttgaaggttactgaatggaagagttgaaatttgccttgtcctgtgttgaaataaagtggttttatctggtcctgacgcagccatcaaaccatcagagaaccaatgtcagtggtgacttataaaatgctaggctccatagtcatggaaataaataagcagaaaaacacaattatatctacagtaatagtaatggaactgttaacattcgagaacaaggagttggtaccaggtttggaatcacagcattcttacacaggttgctccccattattctgtcctgatttcccagctacgtatgatcttgggaggtgcgcagtctataggagatgggaggttaacagaaagcattgttatgatgatgcagcttccatgatctcacccatggtaaggtgagtcttcctgtgaggcatcactttttaagcactcatgctactgtaaataacttgtcaatatttgtgtatgtgaggctggtaaactcactgagtcaccaagttgcactccagtggaaatcatgtctttggtctgtcattcattccctatctaagaaagaatagatggccagatccctaagaaaatgttgtgtcacaaattggcatccaatttctgacatgacagagctaaagctgagcttgagtcgagtagttacatgatctctgtatgacatgggtttttatggtagtatcatttgcacatgccatagtgtgggtgaaaagagattcactgaggctgagggcctcagaataaaaatcagagtgaactgccaggccattttcttctgtgtagtgtggaatgatatgctaccttgatgcagatcacaaaacaaattgtaatcgttgtgagcaacatgcatgggaatggattattaaatgcccttgctggtacacactgatgggcttcttgctaaagagaatgtcagagaaacaatcaggaaggaagtgagcatgacaagggtggtatttcatttgcagtgttttgattggttatgactatgtttgccagagaattaacaaaagagagaggaagccgttgtctttagtaatgtagtccctggtgcgttaaccacaatctagtggatagttaactttgcacccatactcttgatgggtagccctggttaaacttagtaggttaacaaacaaaaagaaaaggacatgatagtgggagattgttgggagggttggaagacagggaggggacactagaggatggagaggtgagtgcatacataatatattatatgtatatatgaaactgtccaaagtatagatgaattaaatatcaaaataaggaagggttaattcaataggatctcagggaaggtatgggggtttggaagcattggtgagtaccagggtaaggcataacatttatgaaacagggaagactttgttagacctaaatgacctagaccttcatatgactcaggatgagggggtgtgaatatcatagttttaactgtctgttgatgagatgttggatagcaaacaaccttgggttttgtatatgcttaccaaggattctacgaactaagttacatgactacagggtgacttaggatttcaaggtttaatttagttgggtagtttaaaatttcacttggttacagatagcaactaagatttttttatggcctgaacattctgtatgttactttttaaaaagggattcatagttgtaattttaacatgtttttgaagggataggcagtgagatggttcaataggtaaagatacttgctgcctagactgatgacctgagttatatcccagggatccatgtggtaaaaggaaataacagactcttgtaagttatactctaacttccacatgtatgctgtggtatgcccaccccccaaaaaataaataaataaaaatgcaatagaatttttcaataaaatagattctctttgaattagtatatattataattcaaattttgctttttcctccaaataaaattatttaaaattgtaattctactctaacttgcattatttagtttaagtttttaagttaaaaatttagctctacatggctttaaaatgaaaagggctaactgctttccttgaccacttttgtcagtccacactacattacactgtgttctctgaagggaaggcaaattggagttccagaagtccctgtgtactgggtggttatgtgaccagctattattacttagccaactatttggatgaatgaaggacctgtgaccattagtaacagtcataggtcaagcaaagggaatgtaatttatttacttcattgaaatcagatttatttggaagaaaagtaggccatgtttgatttttaaagaggtggggggaattggcatgcatggcaaacaaacaagagagaaatgctgggtttctgccattgtgtctgaatctatgctagcatttggtcagggctttctttgctgagaataatcatagcttgacctaaaatttgacggggaaaatgaatggcatgaactatgggacagctgtataaaataaagacaaacacctataaagacctaatgggagggatatctgtacttcccctgaacaaaataattttttaagtggttcttaaatgcaaatacatgatatttaggctctagaccagagagctgatgcagaattttcaagatttgggacaaccctccatcttggaacactgcttctccccacaagcattttttttttaacttttgagaggtgtttagctgttgccagaatgtcctgagggaaatactacatacagcctatgatgtgggaggatattacttgagaatagggtagtgtctttcttttcttttcctttcttctcttttttcttctcttattttctctcccctttcctctccccccctctctctcattagatagatagttggcacttggaaagaaaacttttcaaactacattttataaatctgagccatgggagcacagctatgtgaggtggtgaggaagccagaaatccacacgctgagaaccaagctatgaggactgagctagaagaatccatcgttatattatacatccccaggcctgtggaacagaaacccagttttgactctgccttccttctgtgtgtattgcctcacagaagtatgcttatgcatacgggctttccaactctataaataaagatacaaagtatatcaggaatacatcagcctccaacacagagagtgaaatgttcagtagcagtcattttaaatataatcagtggatgtaaggagaatattgggctagatacaggactctttctagattcttgttttgcctctaggtaacccagtcaatccaggttaagtaagttcaaatctctgtgttcctgtttgctcagttctcacttatccatagagatagatattgttggctattgagaaggtgaactaatgaacaagttaagagatcattctgagctgtacaattccctccagacagcagagcacttgattactactctcctaacagaaactgtagactttggcctctttagggatcatagctatgtttagagatagctgccattactggactatatgctctaacttataattactgtttagtaaccaactacagatccatttgcatattctcacccagtcctcatgattttgagccaggcacacatttctaggtgggttacgaacatgcaggtgagttttgcctctggtcaaatcttcctaccttgtctagcaaaataactaatcactccaggaacctttccctttaaacacacccatgaataacagatagtagctcagtaaaagtattaactaaaaaaggaagttaagaaaaatgtgccattgaaactataagatatataagggcacttcctttaaagcattttctataccaataaaatattacttaggtaagggtaatgagtaaatataatttggggttgttgcatttgaaagtgtgtagattattttctctttgggggggtacatggtatcaaagatgacagtcccaaagtattcttcctgctttgtaggtgaattgacatggccagcaatgccagccttttatacatgacatggtctgctatatgggtttcaaataaattatcttactcatccttgttcagtggtgtggtcatacgactatagtcattgctgtagacatacctgcttcacttatgctaattcttggcccagcatcacttcactggtacacatgcacacacacacaacaatcaaacatcacctaccggagctagaatcaccccatttcctgagtcatagtttgtgttacaaatgaaattattcatgagatttatttgaaatgttattgtttaaattattgagagacctcagttctatagtgaaaaccttgaggtaggggagtgtgtgtgtgtgtgtgtgtgtgtgtgtgtgtgtgtgtgtgtgtgtgtgtgtgtgctgaagcagaaatagtttgatattgcccagttaccaattcacctgatatatgattatggcaatacaggtacttctcaaattcaaattactgcatattttccaatatcagttctgttgtgtagtggggccctggtgcgagggcacacagaaggcttgcacatgcgaggcatacactgcccaattcagctctatcctcatgcgggctttttttaaaagaataattttgaccaagccgggcgttggtggcacacgcctctaatcccagcacttcggaggcagaggcagggggatctctgtgagttcgaggccagcctggtctccagagcgagagccaggataggctccaaagctacacagagaaaccctgtctcaacccccccccccaaaaaaaagaataattttgacctaagccattccaaatcaacaaaagtcatcaggagctctccgtgtgctattgcccatcttataccctttgaagtagacacaccttcactgctcaggtttaactaattccagtcattgcaggtgtggtggcacatgcctgtattcccagatattgagaagaaaagacaaaaggagatacacacttctgagaactatagaagtccgatcaaaaatatttctggtaccctgtcaaagtggaatggctaaatgacttgttaaatctaagatgatcaccaaaccaccttccaagttgcttgcactattttattttactgttttttcaactcttttctcttattatcaccatcaagtctcctgaggttacatagtgatcccccattatctgtggattccacatccatggatccaatgaactacaaatcaaaaatatttatttataataaaaacatttccatgctgaacatacacacactcttttctcttgtcattattctctaagcaatatcatgtaatgagaaattacagagtatttatattgtatttgataatataagcagtgacgatatgatttaaagtatataggaagtatataaatatgtcataatgaaagtgctacacccattcatataaaagattcaaacatttgtgcgtttttttgtatccataagggatctagaagtaatctcttatgggtgacaacggttatctgtatatgatttgatattgttggaataagactatactatcaactgagccatttcttcacagaacaaaatctaattcattcagaatgaagaatgcaaaaatgcatcaaaaggaaacaaggtagagaacgtgagatataggtataatggaatggaggtgccccataatatcaggaattggctccagtcttcatcacttgagtgtaggaataatttcaccattggctaattctgctccttctctttataatttagatcatcaccatagataactattcttgttccactataagaggacttttgagtgataggagtgggattcatgggtcttcccaacttgtctctgtcttttgggctgcattagtaaaggtcaaggcacataaatcccatgaccctcattagtcagccccatgtagttctctctgcagcaacccccctctgttctgaacccatgccaatgtaagggttttggtttttattattattttcaggggcaagaagcttttaattaagagttacacatttctccagagtatcagaatatgcatactatataaagaataatcaaaataaatcaaatagttgtgttttgtacaaatggaaatttgagaagaaatcttagaaaatgccaagccaaacaattgcatctgattacaagaatgtcaggaaaacattaacctttgttttgttgggctgggctgaggactgccaggacctacttcttccttctgagcatgggaattggattaaaatcactgccgctttgtattaaatggtcaaggggaaaacaccatccatactgaatcttacttccatctggattttctgtactctgattagtgtcctcaaaactagcttctctttgtaactaaacactcacctagcttgccacttatcttttatgaagctctttggtagttaggtatgtgcttggaatcatgtagccactcctagtcctcagtgtccaagcatctgattttggcacacagtatccttaaggtacatgaaatcacaggaggccactagcatgaatgtcatgacatgatctttactaacctataagcttggccatttaccacatccatagtaccgtgtacttaatgccattggcagttcactttttgtcacattcactttctatggggcatacagtagaaatgggatgattgtcctagaagttatgatggaaggatatgggggaaaaacaacttaaatttactttataaggaaactatcaggccaatatccaatttgtacatcaaatagaaaggtttctaggaaggccaatagaactattggcagtttgagagtgtttttgtgtcagaaatgttttgtttatctgagctggattttaaaagtaagtgatcaggggactcccccagtggctttaccataattaggagtttagtcctttgcttttagattcaagaaatcaatattacatgttgataagactcatgatgtcagattcctggtacccaaatgcacaaaagaaacaatgtcaacacctatataagcttctgtggtaacaaaaacaagtagttaccatttacaaagtgtccaccttaataataattgtcacagaaaatctcctcacctcctggaattgtatgcatcagccaaaacaaacaaataaactaaaataaaataaattcggagccagacagtgatgggtttttgtgtcctaaccccactctaaagcctcatctgtaccacaagggtgaccacattaacaattttttaatttattttttattttgcataccaaccccagttccccctctcttcccttctcctgcccctttacatccctccatccactcctcaaagtgggtaaggtcttccttggggagtcaacaaagtctggcataccaaattgaggcagggccaagcccctcccccctttatcaaggctgaacatggggaatgggctccataaagtcagttcatgtacctggactagatccctgtcccactgtcagggctctcccacctcccaacagatcaagccacataactgtcacccacgttcagagggcctagttcagtcccatgcaggttccccagctgtcagtccacagtctgtgagctcccattaactcgggtcagctgtctctgtggttttccccatcatgctcttgatcccccttgttcatataaccctccttcctctcttcaactgaactctgggagctcagcccacccacagcaactcttaagattgatctgttatatgtagtgcctaagcgcagtatctgataatagaaatcctaccattaaacccctgttgttgatagctagtttccatcctacttttattctgcctactcattaacaacaatatatcaaatagctcctattagctcctactcagggcctagttctttccaagcatcagcctgcctgctagggttgtgctggtcaacttgcacagctcactgtagaggaagccatgcaagaaaaatgaaattctaatcagaaaacattcagtagtgattactatgtggagaaaatcaacctgatactgtttatggctcctaaggcttgatgcctgttacattcatctctccgtggagtggatcctgctgcacatacccagtaaatcacttaatttattcaggatgactttcccaatcactctcattgtctctgcttgtttcatataaggtatggaaagaggactctgaacattaatattaccttagacttgttagaaaagtgcagccacagcttaatcagaggcctgacgaatcagaatccacattgaaatcgattctgagatgactcaagtgaggatttgaagattcaccttaggctatgctttggtctctcttagggacgcagttcatccattgtattaatgaacagacaagtgtccatccagcagggtaaacttatctcaactaacattatttccaagcattgctttataataaatgtctttcttttttctgttcttgatcactacacaaaaccccaaaacactgttatgtgaaatatttttctccccaagtctttgtttaaaaatactgtcactccaattctgaaaatggcaggtggcctcatttatatttaagggaaaagataggtttgtatcctcttcaaatcacttctagagtttacttattcacactccagtatttgtattccatatccttgaattggaaatcccatctccattctaactccttggaatctttcattttcccttagtctattttttgacataatttatccatcaatcctgttgaagtaatccccatgctgtctaacacaggctggctggggacacggcattgctcttgtaagatctgagtcctctgtgtttttaaatgaaagtggagtccatctgtgtttgcagccatttataagtggatattcagttacttttcaaatccatgcagatgctacagtgttttataatgatggtccataatgagtttggtcttcataaagaaatgtttttgtcaaggctagtttcaaaccacatgttgaatctcttcatggagacaatttctctatagcctgccaagcttctacttacatgttactttgtatgagtaattaagacagataaaatatcaatacacagatacagttatcttcatattcactgttaaaccaaaacatggacctccatataaacaaatttgatatccttattgctcttcagatttgtagagcaaagacacccactgttgaaatgtttgtattcaaaggtatcatatacatcccaaggagtattgaccctacatatttagggtgcatacactagatggatgagacaggatcataagaagtaaattctccaacatttacatcaaagttttcttcaataatttctttctttttcagattctgaagcaggtctctcactattacagtaaaagctaatggatgcaacttccacacgttttattaagccttgctgtttacagagataaaacacacattgtactttaaagcccagaatcagggataaattggaatgctgaaatagtggttgtttggattctgggccacactaagtagcttgtgtaacaattagatggcgaacttaaatttcattcattcttattcatgaagcccagttggggttttgaggtttactttaccggtctcaggctgtctttaagcaatgctgcttgatgacgacttttatcttcatgttgccagacaaggtaggaagaaagcattttcagctatacagatttctcccagggagactgtgagttagtgacactgcacataattcacttaccttatagaactttatctcgtctaccagtaaaaagggctttaaaagaaatcattaaaattccccaaagagcaaggggaacagggcacctgactgaaagagagcttagtagtcacagatatgtctactttacaagaagtttgtggagccacaggaggaactaacaaagtgctggtgagggaacatcttttgcattgctcaaggctggaggtgttctttctgtggactgagcaagtagtgcaatgagaactagatgagcgtcttattagtgatagataccactttttctctcttgctccatctatccccttactttgattgttgatttcattcatgtaatatttggcctattaacatccaaaataagcaaagcctattttttaaatacaagcatcccaaggtctctattgagtataaaattaaaaacgtgtttccctgacctccagttgtctctcagtacacacagtttattccagtttataccagagtttatttcagataccaaaatcctaagatattcacatcctttgtataactacacataactactgcatagtttaaataatttctagattacttatgatacccaacacaatgtaaatgctattaaattgttatatagttgagacaatgtatggtttaggtgataataacaaaagagtccatatgtgttccctccaggcaaaattgctttttgaatagttttgatctgcagttgactgagttcatggacatgaaacaggcatagaaaatgaatgtgtataataagttcagcagaagtctaaccccagaattatttagactagctgtgttcttttgataatattgctcacttacaagaattgatttctcccactgatattctgagacctccaatatctagttgttaattttccttcttattttattggttaagtcacttcaactgaattcttgtgtccctagaaagtagtgagcaaagcactttataaggagcccttctcctttttgattattgtgttttgttgatgttaattcctgttacagaaatgtcttatttcccctccaaatgtttacttctttctagaaatcaaacaaatgtcattttctaggaacattaaagagctcacatattttatctaccaactctttcataatgtaacagttatataaaatactaggtgcccaggtttctaaggctgatgttttatttgagacccatgtaggctttaagtttggctatgtccagattgaaatgtattatgcttttcttacagaagactctgctaagaaaaagaaagttcatagcttctcttgacctttccatagccactgacctagtagacaataacttatcacaacttgagccaaattccaatttttaagtttagaatgaagctgaattttatattacctcgggcacaggttttctgagctctttcagctattgtgcctcttggcattcttatatttggccttatgttcctctcaaaagcttacatagaaaattgtgtttagaaaatgttagctgcatttaaaagtgttgaacttttgcagttctttatgtcttctatatgttaaacacctctatgaagtataactatcaaagatctcccttctggagatatttgtataccttgctggtaactttctctgctatacagaaactctgaaatttcatgtaataacatttattgattcttgtgatttcttatgctgttgtgtttccattaagaaagttattactgatatcttcatcttgaagatagtgtagtgtcagatttttaattaagctctttgatccacttctaaatgacttgatcggtaagtccatactgggaaagaggtatgggtgttgggaatatttgttttactatgtaaagtcgtattgcttttgttcaataatgtaaacatgtattgctgtttcaccttgcttgtctaaggcatcttattgacctgataaaaaagctgaacaaccaatagcaagggaggaggaataggcagaacttccagacagggagaataaggaggaggaggaatttaggctagagaaagaaagaaaaacagatgccagggagatgccaggtcctatccatggaagaagcaagaaactaggatatgcagaatgaaaggtaaatagaccaaaggcaaaagcatagataaatagaaacaggataaattaacttcagggagctagtaggacaagcctaagctaaggccaagcattcataactaatcagtctccatgtaactatttgggagctagatgacagcccaaagaaaattccaaccacctgtgggtctactgtcaatcttctgttaatgggtatcagttttgccagcacaatctattgaatgggctccattatagccagtgtattttagatgcctttgttaaaaattagtttaacatatctgtatgggtttacttagggtgatctcttatattcctcttgtctacatatgaggaaatccctgttcactgttggtgggttggtaaactgatgtagccaatatgaaaatctttcttttcttaaaagattgtttaaaaatctgaaactaaaagtgccatataacagggatgtgccattcctggactatacccaaagaatttgcctctgcccacagaggttcttatacatccatgtttatcattgctacttttgacacaatgctttttttgtcactgtacctctacagtgtagtgtgaggccagccagacattgtgatctcaccagtgggattctttctgcttaggattgctttgactctctgtgctcttttgaattttcggatgttttttcccaagttccatgaagagtgtcatgggaattctgatgatgttgcatttaatctgtaaattacttttggtagtataaccatttccacaatattaattgtgcaaatccatgggtatggcataaaactgtctatcaagaaatgggcacacgaattaaacatagttttcaaaagaagaaacatataaacatttttaaagtggccatcaggaaattaaaacttccttgaaattccatctcgccccagttagaattgctatcatataaaaacttgatagcaaacgaaaacatagggaaaacagaggaactcctgttcattttcagtgggtgtgaaaatgaggcagactctatagaaatccctgtggtggttcctttaaaaaactaaaactgaaagtgccatatactagagctgtaccattcctaggcttatacccaaaggacttcatatcagaccacaaatatagttgtatatccatgtttatcacagccctagtcacaataacaaggaaacgggctcagcctgatagccatcaatagataagtagataatggaaatctggtgcatatgcacagtggaattttattcagctgtaaaataaaatgaaatagtgaaatttgcaggaaacaggatatatttgcaaaatattaagaaagatgactcaaacttcagagacactaacacatattctctctcatatacgaacgctagcttatagtgcctacatttgtgtatataattggatatgaatgtggataaagccttaaaaagtaggttaaagagggtaaagaggagttctcagacttggtgggaagagggtgtaatggcacatgtggcaggaaagcagacgggaggctggagatgactctcaaggggagttggagctagaggatgtgtgaggagaagctactaaaatacactgtatttgaaaatgccataatgatgcctagttccttacatggtgattcttttaatgaataaaattaaatcagaattgcagtgtcttgtaaacaatagactcttttcctccttggagttttgaagtctaggaaatccaagaataacagattcagtgcctggtgagagcccacatcctggttcacagatgatgtgttcatgctacatcctgtcatggagaagggtctcggagagttctctgttagagtgctctaagacaggattcctgccttcatgacaaaagggcccacctcctagtatcttttcattcaagactaaatttcaacacatgggttgagagcggacaccgacattcagtgagtaggaggaggtacttcatctgccgtgggccagaatagaggcaaaggacaagagctatggacttattaagtctctatttgatgctcagatattggacaggtagaaactccctgagtctacacaaacctcttcactccagagtcgtagctggaatcaggatctcttggttgcctgacccgatgccgtttacttaacatctgtccagttagtgactcttttccatcccctgaaaatgttcagcagtttcactgaatagaggtccaggtcaggttttccaagatgtttctggaccatatgtcccatctgtgccttaataaaaatgtcagtggaaaatacacatgtgccccggagacttttgtgtacactaaaggaatgaagcacaaccagaatggaatatcccaaagagcaatcaagccaaggctttgttgtccatcgttttcttgcactaaccctcccacaagccagctgaggccacagaggcttagaaaggctaccatgttatggtcattgtcattttgatgatgaggtgaataatttctcaggaccatatgaaataccaaggtcagagttgtcggttggagcataatatggcaagcaagagtgagtcacagggtgactgctactgtggttgctcttcactgtgattgcccataggcgttccctgcttgactgctctttctaggggggtaaaactcccaaaagcccattttttcttacaaagccaccattattagtttgctccctacaggtgcgtccttcttttttctcttttctttttcttgtaagatgtaaagcctctcagatgaagaaatccatcttcatttctgggtagagttttcaataaaaccactcccatgccctttctctcttttctttctttctacgatgagtgaggcccatgtgcctgttgctaaaatgtattagaataaatgaataaaataaaataatgacaatatgggttagagagagaaatagagagaggttcaatgcattcttttccccatcctttatgtagccccatcacatgacattttacactgaccaatttgaataaaatatgaaccacatatataattttggctttttagaagccacattaaaaattactactaaggtaaaatttatcttaaaaatagacacaagccagtatatccaaaatattatgtcaatgtgttttaatatgaaattattgtcaagatattttgcaggaatttttgtatattaagtgttagatatctactcacactgtgtccagcttcagttgggataacctacatagctatatttcatggctgctgtactagacagctacttacagaataaaaacaacttcactggtttggcattacagctcattgctggtcggtcctctattttatttttagcttcttatttcctacatcgtcatcacagccctaccagttaatttcttgagtataggacttctgtcttcctatgtatacagtggttacaataaatagtctttgcctccttttactctcctcatgtctcaaagcacgtcttttttttttttttttctcccagacagggtctctttgtgtagctctggctttcctggaactagctctgtagaccaggctggcttcacactcagagctccacctgtctctgcctcctgagtgctgagattaaaggcctatgcaagcatttcctttatgaatcatgtgaaatgaattataatagattttgtttcagatttaaccacaactttgctgctagatagttaagtgatcttaaggaagcaagtttcattagactctatgttacctctgaatgcaaaacaaattaaaaacgatgtaaacatatacagcaccatgcttcttggcacataagagttacaattctgccctctctctgttacttctcaagactctttagtgaatagcaggtacattgccacctgccagcagtaccccggggtgaactttctttggtttctaaggtcatttaagtaaacatcttttccttatgctgtgatttcttgaccttttatcttagggccacttttgctagtttttgcctatttcttatttcttagttggcattatcaccctcttcttgcttactgctagaagcgatcaacaaaacacacagccactggttcctgaaagtgaatgattctggtgcccagtgatctgtacaagggccctttcactggggcgcagagctgacatgttactactgaaagctatgcccaactcagggtgactgcacaacagccttgtcccctgctgtaatagtttcctaggcaacacatagagactgccagtgaaagaaattgaagaaaaggcacaacctgcttcatttccactttctgatactcttggagtgttaaacatactgaaaataaatgaatagttgagcatatgttttattatttcatgtcatgttggttgtggctgctgtcataactctaataaaattgttagttattagcaatggtcttatgtgagagaaactgcttatttatagtggggtaaagttgataagttgttgaaaaacacttttgcctgtcattctgtagatttaattctattctgaagtgtattgagatttcataaacagtattttaaatttcctgtcctaatttcatgttattaataaataaacataaaacttgccaagtcactatgctggttataatagtttccaaataaattctttggggggggttctatgcttgtaatcaagtcatataccaaaaatgagaattataactctctattcccttagcactgtatttttctgcatttaccaataggacttctgctgtcttattgagtagaatacaaataattgaaagatacagtgagatgggctactttgcttttggcaaccattagctagagccaagtggcaactgctttcattcaaaggtactgaagagaaccaaactcttcaagtgacatatctgacaccttccctgatatttgcaccctggctgtttcatttgtttgtatttccctcctagcttctagaaaacttggatttttcttccattagcattgtggttgagaccttgacccctaagcgtggggaaacttctgtaaagaatgcttgactgcacagctcactaatgaaagtctgttatttgaggctttactgacatcgtgatattgctgagcactaaacagccaagtgcattacttaccaggctccaggatgtctcattgggagagatgctctgtttgtttagactcagccttcaggccaaagacacacatccttctactctgcaagaagtggaaagtgagagaatgaggaggactggtagctgtctaaagctatctgtggttttctaaagatggaaaatggttgctttggggcagcagagatcctaggctagaagcactaagctactttttaatctttggggttgctttcaagccattgttccccattctcatgtccccagtttcatgaatcatgcacaacaccaatcagaaatagcctagagatttatctcatggcagagccctacagtttccccagaacactgctttcccagtacttggtagcataagaggtctgtaactagactaactgactcaggtttttggggacccaccttcatagtcccactgcactcttacttgtaaattgtaattaacagaagaggaagctattgtatattcacataaaaccaacagccttgatacatataccaaagggattaatgaaaactgacatataactgttcctcattaagtttagggttggcagctaagtagcatatctgggaagaacacagtgatgagtctaatagaggactactatttagtaacatttaaaaccatgtatctccagttctcttggaccagagaaccttctagagcatatgggaatacttttgttttattagtcaaatgaatgcaatgtctgcttttgaatcttgatgtcacagcttaactctggagcataaggcactttcttaaactttttgtaatcttctaccttatctgtcagatggcgacaatgatagcatgccattatagtatccgacacaaaatcacaatgacaataacagtaacaaatgaaaagcaaatgtttatcccatgctctctattaatggattatattttatacaaatttaatattaattggtttattgcctctttatagattaatttatttaaaccacacagttaccaataaatatgctccttaatattctcactttatagataaaggaattaagacatacaaatcaaaacacctcagagcctacagttgtggttaccattaataaattgaatatctttctgatttgctataattagatatatgtaattaattttacttattaattctaattccttctaattcccttgtacccacatacattctccagctctctcttggtagacacttgcagatcaccatgaggtgaatgtgaaatgcaagtctggaaaccattcacaatttcacataagatatcatctgcctctttgtattagctctgaaatgaattccatcgccttttgttcacatgacaggtatatatgagcagaagagagaaggaggctttcaggctagctctagagacttggtatgaaaatttcgggagtgtgctctgatgggcaaaggggcatgttgctgaaactaaaggaagtgaatattttcatcctgttcagtctaatccacttgtgtgcagatactacctgtgacaagatacataagtgactgcacaatggtctgaaagttttgaccgagactgacatccatggtgaatgtcttgtttgattctcagaggcactgctgttcctgctatctggctcattttctccactgtcaggtctggggtcagacactgccttgtcagtgatgcctgccttctccaagttattagtgagtgctttctctatccatggccaacatgccataggccctctccttgcctgtcaaagactcctctcctcacccccttttcctccactgagcttactccagccttcggatttcacatttcagttattccctatttaattcgtccaccagaatggagctttcttgcactgacttgataagggtttattgctaaatattcaggcatttggtaagctgttgagttaggcggagtagaatatttatatcacagaaaatgtaataccattaaaataagtccttttttccccaaagagatgacttactatcaccatgacaccatccctccccccagccctattaaatgaagcatcataggaaagtagactttggttttattcaatgcggtatagaaaagtgacttgcaaatatttgttggaattctaaatgagtgtgtgaggaaataattgagtgagtgagtgagtgagcaagcaggagtcacttagtaccctagcacgggggtaaactcatcatctctcctttcatggtgcaccgagaggctcaccactggatggatgatcttaattggtaaatgaacttcactaggccctcatgtgataggggctcatggaaattagagatcaagactggaggctgaaattccctagcttcctcttcggatcattgaccttgaaccaattgggaaaaaaaattctagctaaatttagtatgaaaaaagagctaaaatatataaacagatgcctagaaaggaaaaaaaatcattgcatgtgataggggaggtaaatgttttagcttgagttcactttcccaatttcagatttgtatttataagtcaccttaagtaagagtgactcctacctttttacctgattttccatagttacattatatatataaagttcgccatgcaatattggtgctgagaactgcataacctggtgtcatgaagtctgagattgcttcctagaggaagattggcattcagaaataaagcataggccagagtcaggcagaccatccaggttggactttggttatttttctgctttctttcctcggtaattcctcagtggcttctttggtgctttttggtgtgccagccctgtttctagctgtatcttttcctatgtgtcaacactgatttctcatttaatcaagtgttgtctgctgagtggatctaggtaatatgcagtgttgtttgtatccagagagaaagatccattcagaaaaaaatgtccttctgttcggtatgtttaaggaaattagaaccatctaccatacctggaactaaatctctctctagaaaaaaaaagccttatacttctcaacttagatctgttagctatgcagtaattggcccaccaatcaagatttactagcaatagccagtggcttcagtttgagtgtaccgtatcctgtgtctatgtaaaaagagagatgctgggataacattaaaatcttgtgagaaaggacagagagggtgctgaatagactagaaactactaaatatcactcaatgtcctgagttcctggttgtggaaactagggaaacaagacattcatcatcttgaccaaggcctagcaggtagaaagagaaggaggaggaagaggacctatgggggcagtgaactcttgaatcgtattctgctatgtactaagcactgtttaagggctgtgtggaatggaacaatggaatgttccaaaacaatggaaattggagaattgatttttgttataagcccaagaagtaggtgctattgttacagttaagacactagagacacacctggcattggtgcctcatgcctttaatctcagcactcgggaggcagaggcacgcagatctctgtgagttcgagatcagcctcgaactcaggtctccagagcgagtgccaggataggctccaaagctacacagagaaaccctgtctcaggaaaaccaaaaccaaaacaaaacaaaaatcctagagacacaaaggcttggtgccttgaacaaaaacccaaattgaagctcctggaagtaggatttgtgaaggaacacccccacatcccccaccccctgcacatcaggagttccctccaagaccccagattaggcacaaaccacacttaaaacctgtttccattgaaagagagatcctttattatacagaaaactaaaagtggctgctttctgactcaggcagaaaacagcagcaaatgactttgcaggagtaatttttaagacgagaaaaaaagaggaggtcagtattagagtgggctaggatatggtggtatattttgattatgcatattaacttaggtgattgggttaattagggagcttttgatttctggagtttaatattttgatatctggaccttggtagttagcatcaggaggaggaagcggccgagtaagggaatagacctcggtgggtagctttaggaatgtaatctaatggttttgagcaaggcaggggggatggggaggaagggcaaggccttctggaaccatgcttgccagagtctctccaatttgtattcagaaaatccccacagctctggagcacatggccttaagcactctaaagtgactgacctgtgtgacatcaaagctcctagcttaactctgagatagaaccctggcccattagtgtatctggtcttcttggtgaggctaatctcttactttgtagatttcacagatcatcagcttatctggacttgaaatggccaatggatgttctcggaactgacgaactttgtcttggattggcagctgtgtttgactggctataatgacatgtctgtaaaatcttgagttttcctgaaaggttgttgatgttccttagtgattatctcttactgtaatgatcctgaggtgatgacaggaagagcagcatgggctgagagtgtctggcttgtaaatgagggacattaacaaagaggaaagacacaacctgaaagaacttcattctgtttgatcaagacatcaatataagcactaaatgaattctctttgaacatattttcatttttgttttatcatatttcctcaaagaatagaggaaggcttgaggagccgattcaccagagcatcagaaattatgacaaagcccaactcagcagagcaatctgaatttagaagctagtcttcttcaagccttaatgtgttctattaagtatagaaggacatacttggttttaaaaaggggaggtacttaaaactttcattttctagaattctaaacagagtcatacccaagagtaggaagattcactagcatgcatttaaagactgagggatttacagatagtgacctgacacacttagattcaagaggcctggttttagtgcttcctttagtgaaagaggattacaagccaccctggactgtacaaggaaagtctcccagtaaagtggggtgggaaaagagagacagagagatttaaaaatgcccattcttcaatcttcagtctctcatcagcggtggggtttctggaatgcagtgtgctgctggtacaggtttttagaggaccacattttgaatttgagtgttacttaagatgctgcatctctcaagtcttactgataaatgatagtccatcttcctgttcatgctttgaggttgctcatccctccacttccagtgaactctcttcagtctgtcaggctgttcttggcattgcctgttttcctaacaccccttttgtcctttctgcttccttacttagagactagttaaaggcggtggctagaactatgaatccccactttctcaccagttcttaaaatgaggcctggtgcacatgaaatacctggggagtaacaccagatgacagaagagtgaattagcatgcccaacatactccagctctctggtattgcataatttataattgtgaagacaaaaatcgaagaaatcaaacaaaagaagaaatataaatacaatgttataaataacaaatattacaaatatagtataataaatactatatcatatatgaatatataataaatggtatgtcatataatatataatataaatgctataagtaatggactgtttcttgaaacttgttgccttgtgacattggaatgagtttttttagagttttctattgcctgtttcattagtacatagtaaaattattaataaaaccacaagagtgcttaaaatgatgcctgaaggtattatgaaatgacttttactggataatacagtacattgtttgttatcagataaaaagcaatactgttctggcagaaaagttcatatttcaggtaactgggaaattaaagcatccatatagaatctgctctttcccatttaacactttcatcccatagtaaagagagaaagagacaatagaatatgagctctgttaaaatggctattagcatatacattaaataaagtatggtaaagaaatccatgtatcaagaatttaaaaatcactccttttatcttctgagattattatatacttacataattttttctttcttccctccaaatcctggtatatattcctcctggctctttttcaaattcactgcatgttttcagggctgaccatgtggtattgcataaccagttgaagtattcttatgtggggaagaccatgtccccagctttaaaatgtgagtaagcagtcttcttagctactctgtatgtgtgggtgctatgtatctacaatgctacatttcattcctgcattgtaccaagtggtttcttagcttctgagggtcaaattaagagaacccacatgtgagtcctaaacttcagatgtccttggaattgatcccattagtgggactctcacttggtttagaacttctgaatccaagccagtgttggtagaattggcctctcacacaccagccttatagggaggcctcaccctcagtttgtcatggggttttcactggatagtttaaattaagaaaggcccttctgcccttctacttactccttttttagttactacaccccaagttgagtggataacaaaacaagtaagcaaaccaaggaaagcccttggagctggctgtttccttcttcatgggttccctctcaaattccctctccttttctactggctgctgtcataaaagagcatctgcaggtatccctaggcttatgagtgtggttttctcccaagatctgaccaacatcatttgttgttctccactagctctgttgactgactggaagcaacttcctagcatttctgtggtgtttcatttcacatatcaccactgcaggaaaagactgaaattcaaatttctaatcataggttatactagtccaatttactttgcatactcataatgcaaaaaaatataactaggactgttttaactgttgaaaattgagaagttgtctgtatatgaaagtgatggcccttgagtttaatgacttcagaaatctccacctttggtgttaggaaagggcatgagttagttttctcaatggttttaagttggagtaaaatggagtagccatagatgaaaacaaaagttaaatttactattacacagaagtatcgatgccctgtgttcttgaaaattatatgttatgggttgcaagcaaattagaactcattttccaggagaatgcttctagtttcattgttcagatctttcaatcccccagatcccatagtgaggtgaatacaacaaaatattatgttcagtcttcttaatgtaggaggaagcatctttcctacttttgaaaatcagggacctgtgtcaatacgaacaagactgtacttctaaccacttaatcatcaaggcttccctgagagtatcaagaaatctattcacaaggtcacagaggctaagaagtccctgagacatgtgtgtcatgagggggagaccaggagagccaatgatagaatttcaccctgagtatggaggcctgaggacctgaagaactgggagacaaggtcacaaccaaagctgatggaccttagatccaagcagagttgatgcttctctcacaccaagaatgctggcattcttacagtgcaccagtcacctttcttcatgctgatgcttgacaagcacctgacagaagaaacttggggaaagaatgatttattatgacttatggtttaggggagatttattctaccatgatgaggaaggtaagctggagtggccctattcatggtggcaagaatgtgaagcagtgtcttctcacatcctggccgcttgggaagcagagaggaggaccagaagcaggtgccagcttcaggacccaagctcccagcaatccctttctgcaaagtctaaagagctaagccatacatagccctgagcatttcacagcttccctaaactgtaccagtgtctagagaacaagtatgcaagcatgtgagtctgtgaaggacatttcacattcaggccatgacaagtcatatgaaagaactatagtaagaaccagaaaaaaaatcaagtggtttttctggggataaagcttgattaacttctttgaaattgtcatgccatcactgttaatttttcttgatttaaccttcaaccccatgataatagcacatagtatggattgtttagtatgattttacaatggacccatgatgatgcttttattacttcaatgattttgtggatgaaaaccctagagacaagagcagtgaattgattggcttaaagtctcctattgtgctaataagcagaattccctgtggggccagacccatgaatgtgaggcctatgtagaaacaaagaacttgtgattctccatttaatgttacatgcccccttgaaagtgtgtgtgtgtgtgtgtgtgtgtgtgtgtgtgtgtgtgtgtgtgtgtattattactgatgaggatgagctttataacagtgatgtatgttgtatatgtgtatagtgcatgaatccaaatgtgtggatatatgtttcattggcatatatgtggggtcagaggagaacatcagttgttttttactacagtctgcctttatatctttttttttttctggagacaggctttctcactgaaccaaaagttcaccatttggtctaggctggcttgttatgaaattcttggaatctgttatccctggcccctaatactgggggttatagacatatgcagccatgtctggctttttatctgggtgctggggattcaaacttagattctcaggctgtacagcaagtgctttcacccaccgaaatatccacccagcccttcctgaaatgttttgttattttcttaaataagttgcccttcagtctcatttatttcatttcactttgatatttgttattgatcctagagtcttgttcatgttagacaaggactttaccatcagatattatcccctacacctgcagttatacttcatgctaggctctgcaaattatgtgcccagacaaatctctctcactataaatcttctactctgaaatatttcttccaagagatataatttcccctgctaaaataaccccaccaggaatagtcagtacctgcttattaccaaccctatggcatgctcttggtgtagtaggcttatcccacatgggtgagtttgatacctgtattgattcttgattgtcactttcatatggaaaaatatgtgagaaaccagcttctagatttctgcctagttagaaggcacataagacacaaaaccttcttaagtagtttatcaggccccttcaggtttttcatttcttataaatgtattcaattgtattttcatttctgcactaagaggcatttcagttttccaccacaatgttctgatacatgtcactctgtgtgacctatctaaatgcattggttgtctaaaagtgatagctactattgaggtattttactattgataatgaacattcatttagttctcagcacatgtttgaaatcattttctgactaaaccaattttttttccatctgaattaagcacgtcagctttgaagtcaaggaaataagagacaaaaagtacatacgctcttcttgctcctttgtttatcttagtgttcaatgtttagttttgtaatgtaagagctgaagaaatgagtagttttgaaactcactgaaccctaaaatcaagttttgcttcatgttatatataagacagattctatcctagtgttttcaattgcaatagtttctttcattcataatgcatagtcagttgttttataattttctctattaccatcacacattgtggtggtgtagggaatattagaatcataatatgacatttgtgcttggtgagtaatgacactgatgccaaagaggcatatgggacttgttcaagactgttcagtaaaagcatagagtggaggaaggtggagagaggtacacaagacagcatgcaaatccccagcattggggttcagtacgcttttattacagtccacaaatctcttttgatgcctaaactcactaagatttcttctttaattttctcttcatgataaatatttatatagccttgagactgaagttaaagtttagccttccagggccccatgaatatgaaaatcagaaatctagggggaaatgctagcttttcagtgaaagggcaacaatgttttccaatgttcaatgtcatgtctggaaaaaaaaatctgcttttctgattaaattctcctaacaaactgccatgttactagattgttttggtaattttctagctgtgtaatatattttataaaacagattgcccagcaaaaggcatcagtaggtgcacatccagttaagtgtatgatgaaaatagtgtagctgagtcttgaaggactctcccaaaaggagcatcctccccaccacagtgcttttgtttcggttgctacagcaaacactgagacgcatttgctgtaaaggcaaattgtgaattctttgccactgaaaagagatctaataagaatcttagaaatgtgagaactgattccaaattacaatattattagcatcaaaatatttttcttttaaaactatctgcttagtgtgtgctctggggatgcaggataattgtactgaccagatggtataacttgtaattgccaattatgagacttttgcaggataagctgcctctgatgtggttgggaaacaagagttctgattaaatattttttcaagaaagacctattacagagcatcatttttaagagtctgtttttatttcctcatgatcaatttgcccaaacattcaattccatttcatatgacactgtttaatattgtcatctcatgcaaaggtgtgattctattcattaagggatgacttttctgtcccctatcctgctaccctagcttacggagtacaagcaaacagtcatacttaggaaaaggggttgtgaacatagaaggatggtcctgaggctggtaaccctttgctatcctcaagggtaccatcacagcactaaatcctctctctgctggttactcctaaaattatcacactgtggctccaaacctgttaacagttagtcatcaagaagcatccaagagcaggcagagagttctagatttgaactttcattcttggtcttaggccatgttagttaagctctctctgagtctcagtgtcttctctaaaattgaaatgataatatagaatacttaatgaaatttaggccgtacatatagagttaaaatactagagtaggtcataatttttctcaatcctgtggatagattattggatcatacatgaaatgatatggctataagaaaattttagaatgaagatacatcactttcaatagattttctatcaacactccagtctgagcactgtatcccagttaggatggacataaaggataagcaacaagttgctttgacactgccaaatatttagaattccaacatctccagataagtgttatgtggtccctacataatccagtccacctgctgcactcaaaatacggcataaatttaattcttcctaattcctggatttgagcccagacaaaaagtaactggtaaatggagatattttcaggcaagacattcagaagagtgtaccatgttaatacaggtcaatgcttcatacacacatcagacattcaagacagaaatgcagaacacattctaatgtacaactccatgggaagtccaacagataggaattccaggaaacctcttaccctgttcttatatctgagagggcttggagggatcactgagagaggctcttggcagagactgtacagattctagagattgtgtgctgtcctgtgtttcagactggttcacaatcccagaaaccacaagctgcctaaatacagggaagcacacatatatgatacaatgtcataagaattttgaaatttgtttcaagatggtagtaaaaatgtttatgtacattttaactttgggttttaaaattatcaccagttcagcagtctcttcatgaatgagcactttgaacaaaagctggtattggctttctagtatgaatgaaagttacacattggctttcttgtataatgaatgttatatacattaatgaagacaagtaaatccccctggagaagtatgtaacaatcatcaattactcccttccattcatcattatgctagtatgatggtgtttacattctagagatgaggggaaggtgccttccttataacagataaaaaccaaatgaagagcaggaaacctcacatgtattcagaagtgaccatcttttaggaactgaggtaatagctatcaacttggataattttgctgtgttgactatgggcactatctataggaatttatattgttacttatatctactggacagaagtcaaggaacctgttatatgtaacaaaaatgatccatgcccatgtgaccatagtattgttgagaagtcctgtacaaaagtaatttagctgttacttcagaaacaacatgtgatgtggattgtagtgttactccattctacagaagcatgaatggtagcagttagaggtcaaagggttattcaagatccagaggttatgagggatgtaggtttgtcttaatgttcaagtaggtcttctaaggcagagtcaggagagaacactttgtcttatagcacatggtgctgtagcctcaattaattattctgtgagtgtcctcaaaaatgttgctatttacaggatagactttaatcgtttgttgcttgggctctaggtggccattagaactgctcactctggcattatgtgagtgggaaggtttgccaaccggccactctctcagtcctcattgaagtcttcccttgtggttgtgatgtgtttaagtccctgcttgcattgtctcaggagagactgatagcttctccttttcaggagagaatatccaccctttaccttttaggctcatgcacatgatcactaaagggtattatgatttgtgcatgtgtgtggtgggtgtttttttttctttttctcattttataattgtaattagatcaattttaaattagaacaagcttcttttatatgccaatgcttgttccctctccctcccctcctcccctgccccccacctctaaccaacccctttctgtttcccagggaggccgaggtcttccatgagggatcttcaaaatctgtcatatcatttggagcagggcctaggccctccccagtgtgtctaggctgagagagtgtccctctacgtggagtgggctcccaaagtccatttgtgtactagggataaatactgatccactacccgaggccccatagatttcccagacctccaaacttgacatcctcattcagagggtctggaacagtcctatgctggtttcccagctatcagtctggggtctatgagcaaccccttgttcaagtcagatgtttctgtgggtttctccagcctggtcttgacccctttgctcatcactcctccttctcagcaactggattccagagttcaactcagtgtttagctgtgggtgtctgcttctgcttccatcagctactggataaaggctctaggatggcatataaggtaatcatcaatctcattattggagaagggcatttaaggtagcctcttgactattgcttagattgttagttggggtcaaacttgtagatctctggacatttccctaatatcagaattctctttatacctataatggctctctctattatggtatctcttttcttgctctcctctattcttccccttatgtggtatgctggagacaaagaaaagatcggggctcaccagagctaacaaggcagacaactgctctaccattttctcctgccagtcaaaaagaaataagggataatagaatttcatcatttgctactttcaaaactgtttactttccctggatatttttggtctcttgttgacatgagcactgactgctcctttgccatggtggataatttattttatatgaggtggtgttttcaacaggttttgaatcatgtctaactctgtctggataaaaataaatgctctcattttctccagtgggtgttttcctttgcccatgaaagttatgattgctttgatttaccccccaaccccactgtatgaactcctggtaaatatttgaatgaaaagtaagaaatggcataaacaaaaatctacctccctccaaaaaagagaaagtgagatataacttctgcttttctaagttttatcctgagttttaaatcatttgttaggttcaatattgggatctattggtggaattcttacactattttttttttatccaaatggaatgaagaagtgaaaatcaccaagcaacattttaatgtgtttattgaaaggcaaagagacctacataaagatgaccaccattagatcaaagtaaaagatgaaatcaagcaaagcagtggggttgagaagagtttagaatggagaggtaagaacaggggaggtaagactggaaagcagaagtgagattgggaggagtaaggaagaggagccatagggccgggaagaagcaggactcagaagaataagcctgggaaaaatggggttggagatagtaaagctggaggaggaaggagcctgagaaagtagagttgagacagataatgacaatggagttttatattcagcaagaaccttagaactttacttcttctttactgtattgagggaaattctgttgtcatgcaaatatatttagatcaaactgggttgatcaagagcaaaaggaagacaaggtactgaatcctctttttcctttttcacagcctatggggtttctcactaagacttctccctcctctgcagttttctttctgcctaactttatgtcttattaagtttgccacagcctctccccatggaatgaccacttacacttatttttcagtatataaccacactgtctaggttattttttagatctagttccttcttaaggatgggggtctagtggttctgttgtaaatttgagccaatgcttactccgtaagttccctgtcttcagtcctcatgccactatggttcagagaatcacactcataggtatagctaggactgagagacctcatctgaagacagtattcatttaatcagatctctgtacaggacaatggtgcatcaaagaagtttgggcagaaaagcaatgacttctaaactataattaagatacaataagattaatcagctaagcagaaaatgttcagtaagggcagagctgagaaaaagtatgttttgattttgcaagttattgctgatgcatgataatcctagcagtaggccattcagggcaacagtgttgagatgtagtgaaggtattgaccatgtcctgccactggtgagtccatattgtggttgacaccaaagcaagataccccttttagcaggaagcttattgagagcagaggagtaatcctaccaatcaaaatgccagatctcccatcactgtacagatcgcagcatcttagtcctctttagggttggtgtttcctacattaccaacttgttccacattgctgaaatgatggtgaccaacaccttgcctttttttatggtaactcattttaatagcctaaaatactatattcatcaacatgttttctaccatgtataagtaaaggtgtctcataataatgatcatcaatgtttgatactttcagaaggacatgtaagtattttttttagctatagaattaccttagtcagtaagttcttactgcacaagcatgagtccttcgatgccaaccctagaaaccatgtaaaaaaaaaaaagctgcatacactgacataggcttatagccacagcatgagagagacagcaacagggggatccctgaaactcactggctagccaacttaatcctcagctcccagtaagagacttggtcacaaaaactaaactggacagttcatgggaagtgacaccagagttggcttttatttagcctctgtacacatatgcatatatacccacacatgaccctgtccatatgtgaacacacacacttgccccccccaaaaaattgtttactcagtaaacttgcaaacagaagcaagtaagttcctcaagtatatggaaacatgaaaccaggaccagtgaaagcccagaagcatatcaaatcctgaagtgaattagtggtatgttaccaagtcacacagcagatagtgaagtgcatgcaaacctgaatccattctggctttgctgtattatcttggctactcatcttcagggtgctcggctgtaaaataggaaaattgcagtcataggcattgtcatgagctccttgctgtgtattttgagctgacaacaataggagtagttttaatcctgaaagggtatagatggggcagtcctggagtaaggatagtgaaatcaggtgagtggtgatttcaggaagattcccaaaacctggtatacaagatagattttatgttcaggtcaaattttaaaattcagcacaagagatagccatgataaatacaccaaagagctaaccagaaactgaattaacagaggttatctctggcttgtttaactggtttcaataataaaattttattgataagaacaggcagctaacctcggagctatgtttgaatgttttaaaacatgttataccaaaatatgtcttctgtttacggagatatttgtttgtttatggcaccttcccaactattgtgattggatgaacacctcacttaatatcctttatcctggctcctgcatatggagtttatttgtatttaaactcaatggtttagatctcaaacctggccaagatgtttggtgtcatcatgctcagacatgtttgttgggatgcttttgtgtaccctttcaaatgtcaaagatttgcttttaacaacctgcaactgcaaagtcatgtgcagttactgagcccttacagcaatgctaacctaaccctctcctgtcctggctccaggacacctcattaaacaaacaaagctccttcccgccttcctaaaggtccctgacttgggctttggcttgctggagatttaaagggaacactagtactcctgtttgtgttcatgttttcaaacttgattttctttttctgtcttactttactactttctggaggctaattttgaccatgttgaaaacagggaacaatctcaggaaattgttttcttgcttgcttttaaatattgattggactcaggcagagggagtataattaaactcacagcagtaatcaggccctttcataagaagacttttatcctttcacctaacctgcaactgccttctcttgtctctcctgggcctagtggcagggagccatttggctcgaccagctgtactttgactgggcttgccatgaatcagatgtccttttcctcctcgaaggcagaatgtgtctcttactgggggcttgcatcacatttcaatttacaaataagtgtttggtttctgtgtcattctttttgagcagctgatacatcaaccagaatgatagaccctggatatatatttactgagcttttcagggtcagccctgcacctgaacttgatgtctctcgcatccataatgtactcctttaaaataaaatattcacaaacagatcagaaaagggggggaaccctccataaggaaccagagtgcaaaagtatcaggcttcttgttgaacagtgaggcaaagggtaaccttggcaggtgtttagacttggaggtgtaaaagaattaactgttgaccctacagaggtatgtataatggctaattgtatgatttcagcttgactaggctgtggagcacaggatacttaggtgcctggagggtatttgggatgaagttaacacttaaatcaataaattgagtctttactccctaacagagtagcctcatctgatcaaggaagacataaatcagacaattgattgatcttcctacctgataaccttaggacatcaggcttttgctacttttggactagagccgaaacagtagattttcttggttttctggatagcagctaactgaatgcagcagttttcaagcctttggactctgactggagctaccccatctgtgctcctgggtccccactataccagctacagacattgtgatgtgtatggttctataaatattttcttccaataaatttctttgtgtcttatttaatatgcaagtatattacatattctatgtggaaagcttgttagttttatttctccaaagaatgctggttaatatagaatactatttatcatatggaaattcacagcagtttaagtagcttaacttgtatggcattcagcaatagaaaataaaaagaatgaatggttgttgcatctgcagcaggtaaaagtttatagggaacatttgttattggggaatcttcacaacagctgagcctcttaatttatgttgtgggtaagttctgcctcctatatcttaatggcaagtggaaccccatttcttcattttgaaggggaaaaaatcaagtagcttctcattgcctttgtccataggaagtcagaaattcaccatgatcgccctgatttctgaattttaagtatggagtttgtgacacagacaagtagggttcctgtggtttcctttggcaaaggttcaaatgacaattctccctcatttatgagggcaacaatggcaatggtaactttggggcaactcttttctatttgcagtggtgccggcaatcagtaggagaataagagtgtgcaatgctggctgcccagcgcagaagcaccctctttccaaggagcctgtggtgcaaattgggatgaagggctataaactgatacttggtcatcttcattcttcaaattttcctgatctgattctccagtcgtcattgtaaatatgttagttcataaattcaggttttgctaaattagctagtcattggtggttgtcaatatgtaagaataagtttttgttcatttacctggtatttgttttctttaaatctttgtatgtatgtgtgtgtgtgtgagagagagagagagagtgagagagagagagagagagagggagagagaggggggagagagagagagtgatatgtttgtgtgtgtatatacatgtatgtgtatgtgtgtgtgtgtgtatgcatgtccccatgtgtgtatgtattcctgtgtgtaaagtatagatgtgtgcatgccatggtgaatgcatagaggttagaggacaacttgagctgtcattttaatctccttccttgtttgaaacaggatttcttgtttgttatttttgtccttctgtgtatgcccagtaacttgggggctagtttgcaggctagaggggaggttatctctgctttctatctcccaataatggacatttgatactgtgcctagttttacatgggtttaaggactcaaactcaaactgtcacactgtgcggtaagcactgcacccattgagccatcgtctctttagcctttctaacatttgctcattgcctactgtacagtgttacttttctaattgtgactgatagaagacaacgtggcaggcaaggcagttttgcatgaaaattgctttattgtaaggtaaataagttaagaatataagcaaagaaataaagaatataagcaaagaagaccaatatgatataagcacaataaaattaaataaaatataaatagcatgataaagagacagaagggccagaaactgtggttggagaagtcctctatgaggacgagatggttgtatggagacttcagtgacaggaaagacatacgtatactagagaataggaaatcatgggtgggaataacagtcatttctagattacaaataatgcaagttccaacttggaagatatttagaacccttctaagtcacatatgcacatggataaagaaactgaaatataaataaaaacacttccaccccttgtgagaatattttaatgtttcagaaggtcagtatgtatgtatatcatcctatcctacagttaaagaaggagacactgaaatcaaaatgaacccttttggatcctgacaatctcattgtggataccccctttcttcccataattaaagctttataaaaggaattgacataacctcctataatgctttgcacataaaaatcaaaacactaggctgtgttctgtctctatgtgaacattttttagtcttgaaacactggatagtttgcatttagcataatgttagttctgctcagctacctaaacattgtgcccaaaatgagctttgggcatcattgcaactgatgaaagcaatttggttctattgggcaccatcacctttcctatgttatacccataatttgagaactcccatcttttgtttaccctaatgcagcagaagtattagaaacgataaaataatgaaacaaatatagccactgcttttatggccattgattcctctgtttatccttcggtctttctgacacatgcaagaaaacagataccttaagtgaattggacattaacctacatagtccctgtctccatttaccatttatgttgccagtcatatattactcagtcagtcacatccttggtattggaaagcaggcaaaagttattatttccacaataaacattcaaactaccaattgtgacttatactagttatctgaaaattacttgttcccaaaatatgtgtagaaaaccagcaaaagggtcattataatactgtctgccttagagggcaccatggttctgtgagccatccaggtaccttttgggaccctagacctccttcagctccttgaataagaatggaataagatcagatgtgtttgttgatttttttttttttattgtcaagccacatgcagaaaatagctgtgcactgtaacacgaaaataaaaggacctagagactgatattggggctcaaactttaagctgaagatcagaaaagcaaagtagtaggccactagctcttactactacgtcaggctgaatgagctgatccaagagctcttcaccaagcctcaaactgctgcttctcttcagtgtggctgaagaatgaattcctaacactgacttctgaagaccctactccttcctatgttttatactccttcctatgttttttgtgctgggattaaaggcgtgtgatctcttactcttttccgatgattcaatctcatgtatccctgggtggccttgaactcagagatatccatctacttcttaatcccgagtcctaggattaaaggtgtgtaccaccacctcctagtttatggctgctggaattaaaagtatgtgtctggcttctgcggcttgtgactgactttgcttttggtttttcgagacagggtttctctgtgtaactttggagcctatcctggcactccctctggagaccaggctggcctcgaactcacagagatccgcctgcctgcctctgcctcccgagtgctgggattaaaggtgtgtgccaccaacgcccggctcctgactttgctttttgaatccttataataagtcataaataatatatcaccatagtgcactgtgtctatgacaaaggatgacactgtataccagaatgtcctgctagtcacatggctgaagaatagatccctgcatttacagttcttctgtggtgaaaattctggctttgaaatataggtgattcttagtactggaagaaagactaaaataaatgccttcctagttgtactatttttgtttgggagattgtacataatattcctcccttggtgaaaaatgcacgatcggctctttttctttttaaggaaagggacttatgcaggggctctttttgttgtatgctcacatctcactaggctagccacatgaacctattgtgcacttttctgattgacagaaatggaaagctactactgcttacacaggaaatggctatttatctgtaaaacagcatgcctagagaacagagagaatgtgtcaagccaccataagccaagaacatggacccaaagtgctgcttgggacatgatggcctgaattgcaatcagacttcttgattgatagcctaggaagaaagaagtcacttctagtcccttctgaacagacttttgctgttcatggtgatggatgtcagggcttgacttcatgattaagccaccaaatgaatcacaaagttaaatacttggcaaagagaaatatgacatgcaaactacatatggcatactaattctcttattcagaaatacctaatttctaaatttcatgctgcgtttggtgtctctgaataaatgctaaatgtgcttttctatgtctagactaagctagccacacgagctgttgataatgcccacatataggacattgtagcagttaacatttttggatcctcactctatgaaagacactgtattaacaccaatgaattcaatatactcctcaaccttgttatgaagtacacaaataattcttattaaagaataaagcacatgatgctcagtaatatactcaaggacctacttaagtaagggatagagctaagacttgaacccaggtctccttttccataagccccattatttaactgcttccctactatttctctagaagagtagcttcccatgagtaagctctttttataaaaaaatttcttatttatttatttaaataacattttcatctattttacataccaaccagtttcccctctctcctcttctcatgtcccctcccctttctgatctacctccttccccgtccactcctcctccatctctattcagaaaggaacaggcttcccatgggcttaggcaatgcatggcactttaagttgaggcaggatcaggtaatccagcatggggaacaggttaccaaaagccagctaagcatgagggagagtcctgctctcactgttaggagctttattaagagactaagctataggattgttgcacacatgcagatagcctaggtcagtcacaatcaggctccctgactgttggtccagtgtccatgaactctggagagctcaggtcagctatctctgtgggttcccccatcaaaaccccctggcggctggttcaatccctcctccctttcttcctcaagactcttagaactcagcacagtgcttgtctgtggatcactgcctctgcttccatcagttactggatagagtatctctgaaagcagttaaatgaaacattgtatacagaagtaggaaaagagatgaaagtatagtattatgaacccttgaattttttgcaacctttatgtagtctatatctttctatctcatacattggaatatttcttaatattttaaaaggaaaatgttcatgaagaactgttgtagccaacagttaatatatcccttacatatatttgataccatcagaagtatcggccatctcaataaagccaacaatatcaactctgcagcagcagtatttcaggcagaatcatttcttctaaataaagttgatgccatgtttagcaagcttgagctatggagatcttcttttaactgagtatatgaatgtatgagagcaattcattgcctgactcatgtatttatatctatagatttatgatcatgaagaaatgatagggtggtatgcaagtctataggttgtctattgcagagggcagagtgtttattgtcaccagtgaggaaaaaaaaaaaaccctagccagagtgagtcaatttgtcagacctaatttggaactgaagtggagatgtgaattacctaagggtgatattaggacaaaaggttgccttgtgagtgagaaagtcaatatgacagtactgggttactcagttctggaatcaagcacactctgggtttaagtgctgctttacaacatctctatatccagaaacttgaacaaataatcagttgtgggaagatctgtcttccaatgtgacgctgtcaagcatacctgatgtatagttgaggtaccacaaacaatacctggctttgttcaacattgaacatatacaagaatcctgaaagaagggtatatttatgttgaatgcacatttttgggtatgtatagccgatgtctctcctaatgctttaactgtttacctctaaattggcttaacttgcatggtatttatgacaaattgtggatttggaagccatccattatgctgaagaatagagccagcatggcaatgcactgactgtaacagaaataataaaaacccagagacagatattggggttaaaggtcaagaccagagaagcaaagcagccagtcacttgagagttctcacctctaccaatgttcagactggccactatggctgtggctagctttgcattctgatcttcaggcaacctttattagatcataaacaacatatcacaacaacttactttgattttcttgctaaggcaaaattaaggtgaggaaaaaaaaacaagaagtattcactaatttcttacaagagggacaggtcagtactttgagttttgttataaggtcttccccaaaggtgaaaacaacagcaatgtctatacttttagaggttatattctgtgaaggtacctttgtctgtgccacccaaccagcattctaaacagtggtgctaaatgtgtagccctttgtaccttagatcacagagaggacagcaatgggattacagggtgcgtgccttaatttcttctgtcacaaggaactttgtgcttggttattcagacagctttagttcaaatgaaagtagtgaagcagagctccggcagcacctaagcccaactagaaaaggatgtccacaccaggagttctccctcttgtcctcataggccacttgagatttgtaaaccatacaggttgaagattccattaacgccatatcataaatgtggttgcattcatatttaacacatccattcacgccatgaggcctttgacgaccttatctgggatctaagtttttggttcttgcagatgacaagttcctgtgctgatgtctcatctagcttctttggctctgtgttgacattaggccacactgttctcattttaaaaaaaatatccagaaggatgtggaattcctgtgttcccatgcacatggtgaatagatgtggaaagcagtagggtttctactcataggtctgtgagctgtggagggctgcacaaactccacagtgaactcagtgtactggaaaagctgcacacttcaacataaagggaccagatcgttttctcatctggcaacaggacagtcataaagacagggagcgactggtgttttgcaatctaccctgctgtttgttcctttctctgtttgagactcctggagtgtcctgtcaatcagaattccacttctctgcccttcttcctctgcagtattcctaggtctccatttctccttaggcattctgaaattgtcttaatgatgttaactaccctggtgggtccctgaagcagcaaacaacaaccttaggcttcctgcctgctgctgttgaactcaaccaatgaaatcaatttgctgccgacagctgttcctctccacactcattcgagaactttatagatcttccagctcctttcctggggaagcaatttgtggtccaggtgtgtgaggacagagttggatagctctgttagaattttatactcttttctctgtatcatataggcttcctcattgtcctactaagtcactgtagtggtaaatggtagacaaccctgggtaatgctggagcagactggataggccttgacttattggagataggtagttcccactagggacttgtttctatgtaaacccacttaggaagaattaatttagttgtccggaaccagaattcttatggagaagctgctttcaaaggaccccattgtgttaactagtaggtttcttggcaaaaccatggaagcactgcattagattttggatttgagtcccacctttttttcatatgtttatgtggcagcaatttatttctacatagacctcaacagattcatatcctgagtgttcagatggagggggtcacattattcatatcacagctaataaaacaagtaggataacccagaccatagaaaaatggaaattaaggcttcaggtgtaatgaatggacttaactttttaatacaaacacttcaatatttgaatttttcagatttttttttgtaaagagcatgtgaaaagttatacttagtgatttcttacctttgagaattatggtagttattttgaaagctaagtttggatgctgaaaaactgaatttaaaagggtttaatccactcacttaaaggcagtggtgaaaaggcaggaattatgcacatttaagtaaatgaggtcattaaacttgaggaaaaattacagaaaactgcagtaatgtttccacttgtctttggggtgtacggatgtgttgtaccaataagaataaaggacaatctggggctgtgcctaaggtagaagaaaaacatgccattggtgtctgataatgccctctgctctagacacactagcacagtctcagtaggcttccactcataactttgatcccctttttgtcatcttcttcaggctgggaacagttagaagtattttcccttgtgcttaaaagaacaaagcccttcgcccatatgcttcccttgtgtatttatgaccattttaaggcaatagggcacaacaaggaatctgattgttgtgtgtgtgctttaaaaggaagaacatggattgaaagcaattactgcattgttggtggaaaaaaatattgcttcctgggagcactgaaatcaaatacaaatataagatgaaatatattttttgttttgatttagaattaacatcttgctccttttttctattttttatttaaattagaaacaagattgttttgcatgtcaatcccagttccctctcccttccctccttctctacccccccccaaacccctatcccacccctttctgctccctgggatggtgaggccttccatgggggatcttcaatgtctgtcatatcatttggaacagggcctaggccttcccccatgtgtctaggctgagagagtatccctctatggggaatgggctcccaaagtccatttgtatgctaggataaatactgatccactaccagaagccccatagattgccaaggccccctcactgatacccacgttcagggcgtctgcatcagtcctatgctggtttcccagctatcagtttattagggttgtgaaagattgtgtaactaaatgacagtacgccttttatcacagtgtgaaatacttttatacgtggcctgcttaaacttacactgaagcactggctatccaaggttgattgagagagaagcagtgaagagaggaaggaaagagaaaattctttttaaaaagtcaataaagcctcaaggggaaaaagagggtcaatcaaaatgctcaaaactatccatgaatcttttaagctacccaaaatgatccttgagggtaagagcagacattagagtgtggagaaatacaacgcataactggaaagcagtttggctgagaaacagttgaaagagagaatgaagacgagacatctatgcctacctttcatctactgattcaaccgtgtacgtggaccatcttgtgcatctagcaggaggctttgctggatgggaaggaggggaagagaaagttacaactgagaggaaatggagaccacacttgatgggtttcggtggagttattgctgagataagtggtgcttactcagccaagtggggtttagaatctagaaatgtactgagccaataaaagtgcctggtttgacaaggaggtgaaaagtgcagtgaccagtgtctgcaaaacagcaaaggagtggttctccatgagaaatcagaaataattttgcaaattccttccaaatggcattatgcttcaaactctgaaacatacccatcattttagatttctttaaattgacaactaatttttttttaacaaaccattctccatggtccatttgaattctaagagacatattttattctcgctgttattagtgttgttgttccctaagattaaataatatttctatgtggcttttacaaaataatatttttgttcattgaaagtttcatacaagtatatatataatgtatattgattgtattcagcccacctccagtttactccaggatgcttcaacttacactgttcctcccaactgcatgtcttctttttaaatttcttttttttaatcatttttaacccactgaatccacttagtgcagctcatatgttcatgggtgtaggtcgtccacatggacaacctgtgaattctgagcatcctgatatccaaatccaagggcaaacaagtaagggatgatccctgtgggtcacagctagaaggcagaaaatgtcgtgaccctagttactcaggcaaaacaatctatcatctatacctccttccataattggaaattcttgtgagcttatattaaaatttttacatgaactaactcatctttctgtgtggcaattaagtagacactttattatcatttttatgtgatgttttagccctcagaatttgaagctgatagaaccagagttcacactaggaatatctccttcttggaccctgccatttggcccaattatcattcttattttcaccactgtgactcagttttctgaaaaagagaagagaatgatatctgtgttgctctggaggccagactgaatgatggaagttttacacttttccaccaaggcaatacaaagccctggaaaatgagtattctttttttgtttgtttgtttgttttgctttttccgagacagtgtttctctgtgtaactttggagcctatcctggcactttctctggagaccaggctggcctcaaactcacagagatctgcctgcctctgcctctcgagtgctgggattaagggcatgcgccaccaatgcccagcgaaaatgaatgttcttatcccccttttcaaatatgaaaaccaaggcctcagaggtgactagtttgttcatagtcagtatagatcacagtgaagattcacagcacgccttgtggtgtaagtgtaagaatgattacttaattagccaaagaagcaaaaacttagcaaaacaacaacaacaatactgttgaagtaaatacacacaaatattgacctggcattttcaacttaggaaacttcctttttactattttccaccatgaacatttactgtatgagtaatacaaataaatgtaactttagtataatgagacaccattaaaaaaagagaaaatatttctaattgttatccagtgataactctttctgtgcttgtgtttactcagggaactcacatattttaaaagtcacaaacaaccattgtaaagtcagacaaggagcagcagccaccaaaaatctcctttcgacccaaaagaaactcatttacatgggctgacaaatgtttcccactctggatgaggaacacactcttacttttcacaccatgcagcctacccctagatttgctgacatctgaatcagaataaaatctcaaacacatcctttgccaagttcttcaaaagctcagtgcactcttcccaactcttcacaaataaacggaattgatcacaaagcttctcacccagattcagaattctcaaattaaccttagttacacactggactcaagcttttaaatcagtcagctcttccctgctaaagataaagaacatgcttcccccatcttgaccatcctgtttgaaaggatagagaaggagagcaaggaaagagatatcttgattgaaggagacattatggagaaacctggcactagggaaattcccaggaatccataaggatgacactagcctaagcattagtggagagggtgcctgaactggccttcccctgtaatcagactgatgactaccttaattatcatcataaaacctttatccaataactgatggaagcagatgcagagatccacagctaagccctgggctgagctaccagagtccaatcaaagagagggaggagtgataatatgagcaaaggggtcaaaaactctttggtgatatccacagaaacagctgccctgagctagtgggagctcactgactccagactgaccacagcggaacctgcataggatcaaactaggcgctctgaatgtgggtgacagttgtgtgagttgggcagtctgtggggccattcgcagtgggaccaggatttatctctagtgttttaactggctttttgaagcccattctttttggaaggaaccttgctcagcctagatatgctggggggggggtgtgcctggtcctgccttaaagcgatgtcagactttgttgagtccccatggaaaacctaacgctttctgaggagtgggtggttggtgggatgggggaaggtacagggagcaggaggagaggaaggagtaggaactgggattggtatgtaaaatgagaaaagatcattttaaaattaaaaaaatgtgtaataaaacaagaattgaggctgagagtgtggtaacatgtcaagggacacacaacttcttagaggcaatatatcatactctgttgtggagaattgataagggaagaatagttaatgtaaactctatcatgtctgtaattaaggtcacaaaatgataaactagatcagaggaattgatttcactttacttgagagtgaagaatgataaagcacactgggactggatcttctatacatcattagtatagtttggatctgcacatgtcccttggagcctcatgtcttagagatttgtatatcaccccttggtgttacggggaggtgggaggaacattaggagaaagattatagtgagaagaaagtgacgtcattgggtgtggttgtgcccttgaaggacaaagtaggaccctggtcttgccctttcttttttgcttcctggctgttatgatgtgatcagccttgctttattgtgtaacactatcaagatattctgcctcacaacaggcccagaaacaataaagtcatagtaggttgagtcctttgaaagggtgaagccaagcaaatttcccctcatttaaggtcattttgtttcaggttttgtcatggtgacaagaaactgactaataaaagtcactattaaacatgaggtaatggtttagacccagcttctccctatattattgtttcctcatctctaccatgctgtttccagtatgtggttgttcagtctgacattttatttatatgtaatcaattctctgtgtgtcctcattttggttatgtaaaatacagttccataagttgtacatcataacaaatgaactctccaattagaaacaaggcagatagatcatggtgtgaaacttacattacactgccaccatcccaaggatgagccattgggctcaccattctgtcttctttactttgtacgttatgtaggaaaatgactgtggttttgactccttcgtatgccctgactccttctagcaagtgtggtccagatggacgagcaggaaaaactacagttcattcacagtgcatgcagccatttctaaagcagtgtacctaagtaggaataggatagcatttcctacttttgatttaggtttcaaaacctagacctataaatagaattgcagagttcagggcattagcaatacaccacaattcactcagaaactcctcttcccttttgttcatccatgccatcagttgcctcttcatttggacctaactgcatgtatcatatcttgttcttggaaataccattatgtgaaaaatgtcacatatgaacagaattgacaaagatgagatagaggccagttagccaaatctctgcctgagtttatataaggaatgggtgagacaatagccaggagcttgtgtctcacagatgctgggcaaagtaacataggattgcaactttaagatgcagtcaagctgcagcctggcagaagaaaaatgtgataggctattcaatcaagcaagcacaattaccaatgcactatttgctagaaaatactattggaccacctagaagacagacatgatgcccctaggaacacagcattaagatccattaccaccagggtagtcatccaagagaaatttttcatgaattaagagacattattctttagagtcacaggcaggggtttctttagattgttaaggggatgaaggtaacaattttttatgtttctggtaaaacacaaacatttttaaactaaggaaagcttagttttcagggggggtctatttttatcacatactttacaatttcactcaattggaaaagtagtgtattgtggtttttattgaacatgtttattacactctatcattcaatcatgtttctataatttggcatcgaaacttcatgagaaatgatgtattcagattcaagcagctacagatctatagtacaggtatgttgtgtcactgatagctacagatcctctgtgaattgatgggagacagagaggatgaacagtgaaccccagggagtcttatgtaaaagaattgaaaggccggtgaaacaaaacaagattttagtggtaaccatggcaaccttcatggataaggaagaacacgaagctctctggtcattattattattgtatttgaacatttattgactggctgccttggtagaatcaggggtaatcaattttttttctcgggaggaacaaataaatggagatgaggtctccccaaagggaagccagtgcagtgtaagcagttttaatgaagtcgggactttcagatgacagaagaatgttaagctgccttcgctgagcagggaagagggtttttaaacttagagattatctgatataagggacagttagtgacttatatgctgtaaatagctgatgggtaaaaagatacataataaagttagcagcaatgtggaataaaagaagccaaaggttgggctttaaatgaaccagagaaaggcaatgatactgtgtgagtttttgtttgggattaattttttgctcagccatcttctcctggaatccctgaggcactatttatttagtgtagtagcataattaagactctgatctatcaaagcccaagtgcttgcataccctaactttggcagtgcctctgttgactactcataatatgaaatgtgaaagctgagccactggaagacaaaagcatagctggctgacagaacctcaagtttcttctgaaccttctcgggatttctcaaacaaagatttttgaataagtatgatctcaaaatcaccagaatttgggggaaatcaagattcctcattttgaacaaattcaactgatatccacattgacagcgattccttcagtcatgacttgatcttgttaggtcaatagatccaactgggagctttagaaaatcctgctccaggggcagacaccgcagacatgagcatacccaggggtagagaaccacagcaccttttaagtcagaggtggataacaagcaagtggatgtgctttgtgcaatgttttgcaattcatcttacagttacaagcactggaagatcacatatgaaaccccctttcttgaagcagctgtttcttccagctgccacctgttaggccagcgtgctctgtgtcacaataccaggtcaccccagctcagccatcacttgctccatctctcttgtttgaatcttgggggcaatgtatatttcagccttcatgtaagaaccatgtgcttatggatggatagtgtgtaatcctcttttcccctttatctctttaagctctcaactcagatatggcaaaggtattggaaaatttagcctgtattattcactaactttagaattcccatggaaacaccgatttaaggcaggggaaaaaagcatgcaggagacaaagactggcttgcttctgctgcttgattccatagttaacatcaatgtcatataaactctgagtaggatgctggttagtcttagtaaactccatatccatgcaggacggtggtacacagggaagggaagctgtaccagactgacatctacccatctattcaaatgctttcatgtgtcagctgatgccatgcactctgcactccagaactcaggaatccttgtgagcatatatctccagacagctctgaggagtagggatgtgaatttaaatgccactgggagagtctgtacactgtcaccaccaacttcagatgcctcaactcaacaagtggtgtaattgttttgtttcaactctattgtttttttttcccttttatctggaatcttatgcatttctaggcacctgcctgcagtaatgcttctgaaattcctttgccctccttcccccccccaaaaaaaaaagtccagtgacctggcatttctgagggcacacttatgcctgctgctgccatctagtggaaacaccataacctcatgaatgcctttatctttgatccacattgaactaggttggaatgcatttcaaagaatttctgaggccctacttccagctgaatggatggcaattcagtgacgatgtgttagcaaattttacacaccaacaatttctcttgacactaattgtttttttttaagtatcttagatgctagttgttaaaataccactgcccaatgcctctaaagttcaagaagaggaaggctatctggaaaagacaaagccaggactgccaaggagaaaaaaaaaatccccacttgaagcacttggagttctcttgtcactgtgggcacatcgctcctctctacatgaagagatgtcccaagtgtcaccactttggtcatcaaccatcctggttgttgacccttagcctgggcttcaacagtggttttctctctatctattggtcagaacatctgaattttagtttgaaatgtaagttgtatgcatctgctagtagtcatccctttaaaaactaaacctagctagctactgtagtcttagcaacttcgacaaaaggtatttgttttcttgtctctcattgtcttctttgttcctcctttttccaaaaataagcatctctcctatctcctttttttcctatttctggtttatttttatgatgtttttctctagctttcttcccacaaaaccttctgttctccatgaagattcccagcagttctcttctaagtgaatcaaatggactgaatttattctctaatttttgagaaaaaaatgcttattttgagaatcttgatattttgggatacctgtaaaaaacaacaattaacactgggtcatatcactctaacaatagccatattataatcacaaagagctttattctagtcctcttgaaaatttctctcaaggccaagaatattttaggacagaggttcacagagttcactgggatctttagcattccgtagctgcttttgatttacagtagttggcccaaaagagtctggatataaatcagcaatagtttctcagtgtaaaaatagggtataaatttcactatggtcatcaaattatatgactgtgttgtgtttgtaccatttggagccctggcattgtgggtatttcaatgaactacatctgttcagagtctgccctctcccaaaacctgatactgctactttgggtactattatggctcccaaattaaaatatcaaattgctgacatttgctgacattccttctaagctgtattgcaagacaccttagaaggaatggagtatatctcctccttcttaggtattgaagaccctgggaatagagaagcaaacttctgacagaggtcctgtagctctgcctcatccagagtggggttcaggactgtaaagcctctagaacatcattcattttatttatactcacatatatggagcaatacatttgcatgctatgtttttacatacatattttatctaattcatgatatcttccaagcatttttcttcattatattctccaaagatgcttttataaagaaaaggtaactatgccattacagttgcaacatacctacctatgttaacatcatttcagttgttgtctgaaactatcttgaggcaagaccaagttggaccatagtgatcattaggtccatgattgcatttgctgtgtattgcttcaagagtgttctgtgtcatctttgataaaacatttaaattaaaagaattgttgaacaattaaacaggccctaagaagatccaactgacaatcataagtgattaaaacaaaataaaacaggtttctctcaatacaccaatttcagtacacttagacttaaaatatgctttaaggtaaaacatgtttttgtctctttttatttgaaattttacatttatttacttattttatgtgtgtcaggggatgtacatgccataacacatgtattgagattccaggacagtttatgagagttggttctttccttctaccatgtgagttctagggattaaacttgggtcctcaggtttggtggcatgcatcttcacaaactgagccatctcacaggctgccttccttttttttattcctcctcctcctcctcctcctcctcctcctcctcctcctccctcctcctcctcctcctcctccttcttcttcttcttcttcttcttcttcttcttcttcttcttcttcttcttcttcttcttcttcctgagcattagactagtcacagtagcaactggatgcttcaagcaaagtcaaggattaattcccttcctaataatttattttcccggttatttttttaatgagagttcaatcttgaattaggaatatgaattaattgggccaggtgtggtggcagatgtctttaattcactcacaaaggagacagaggtggccagatctctctgagttagagactagcttggtttacatagagagctccaagccaggcaagaaacactgtctcataatgattatctgtttaaaaattatttcctcattaattaataccttgtttatattttaaattgattctttaatattatggttagttctttaatagtcttaaaaaactgtacaaactatattgcctgtcttccctcctttccttcctcccttcctctctccttctcttcctccctgtgtctccttgtcttcctcttatcatccactcatctggtacctgctgtgaccatataattttaagatgtactttttgggattgaaaaatatggtctcataggtgttaattttgttgatgtttaacttctagaattgtgcggggatttatggttacatctgaaagtttataaattttcctttgattttatattaatttcttaaatatcctgaagcccaaatgctttgtgtttttttatattatcctcaaagatggtgatgaattaaattgctccagttgagaaaaaaacaaaacttatactcaagcctataaaaaatgtaatttcatctattcttcccctgactcaacccttctgctcccttttgtcctctgcatccctcctcttctccccttctcattctcctagctccctcctccctcttcccgtgatcccagtttgctcatgggatgttgaccctttccccttctccaggggaccatgtattcctctcttagggtcctccttgtttactagcttctttggtagtgtggattgcaggctgataatcctttactctgtctaaaatccatccacatatgagtgagtacataccatgtttgtctttttgtgattgggttacctcgctcagaatggtttcttctagttccatccattttcctgcaaatttcaagattccattttttactccattgtgtaaatgtaccacattttctctatccattcttcggttgaggggcatctaggctgcttcattttctggctattacaaatagtgctgctatgaacattgttgaacagatgtccttgttgtatgaatgttcttctcttgggtatatgcctaagagtggaattgctggatcttgtggtagactgattcccattttcttgaggagtcaccatactgataacaagaatggagataccatagtagagggagacattttaggtttacagagaaatcaggcactagggaaatgtctgaagatctacaaagatgacaccagctaaaaatctaagcaacataggagaggctaccttaaatgccctcccctgataatgagattgatgactaacttatatgccatcctatagccttcatccagcagctagtggaagtagaagcagacacccacaattaatcaccgaactgaactgggacccagatgcagagaaagaagagtgaagagcaaaggggtccagaccaggctggagaaacccacagaaacagctgacctgaatatcagggaactcttgctttccagactgatacctggaaaaccagcatgggactgatccagaccccaggagcatgggtttctgtgaggaaacctcggaaatctacgtgacctcctgtagtagttcagtacttatccctagcataggtgtggactttgggagcccattccatatagagggatactccctgagccaagacacacgggggtgggcctaggccctatcccaaaggatatgatagactctggtgacaccctatggaaggcctcaccatccagggggagcagaaaggatatgtgatagatagggttttagttgggggtgggtagtaggggaggacaggagggagaagggaactgggattgtcatgtaaaacaatcctgtttctaattcaaataaaaaaatgttgaaaaaaagaagaaaaaatgtaatttcagttatccacaaaaaacgtacatctctgctgttcagtgtttttgtgtctatctcaatgagaccagtgctgcctataatgaagccagttgacttggtgggagaggtttgccttagttgttacacttggtaagagcacttcagcaacaatattcccgttcactaactcagaagctgatctaatagagggggctgctgcctcctcccctttccatagccacagcaggcaggcctggcttggggttcattagagtctgctaggagagcaacaggctggaaagcagctgtaaatgattacaaccaggcctgagctagcttcagtctctgccaaacccagtgtggttcccaatactttctggattcagaagacagcatgccagcctcatacctgctgatcacaagacacagtgagggtgtgcgtttctctgactttgaggtttcagaagacatgcttagcatttgggtcagtcttgcatccatgagccaacagaaaatgacacttgagctggatgtgtttgtgcatggtgtttctaagggggattgtcaatttgcttcaacttctgagctaaatctgccttttaaatgtaatgaggaagaggaagtaacctgggaattgtcttgactgggctctttgtttataaatgagtgataggctgaggagtcagacccacacagctatgctaggtgtgcagctgagccctactctagacaccaggaaggtgccagtgaatagcaatgagatatttctctactcagtggttcaatgtttggcctgtcattgactgtccttataaagctaatcaatttgaaagatgaaaggtcattaggaatcatagtgacagacatacagatgaataaagaaatagacatgattatacatcaaatggtttgcaaggtatttgatttaattagcttaaaaacatagagatctaattaccaattaaatagacaaaatagaggtaggattgcaaattcatttatattcctaaaagacaaatatgcccatatatatccacacaaataaataagacttcatgtatgtttttattatctacgtaaatcatccactgttgttggatttttgttttgttctatattgagttttttcattctgagcaggtattaaaaggcaaggtggagaaacaagaggcagacaggagtgaagatagtcatcctgtaggcttcattttcctcagttctccattccctctgctagtctcactaatcttcctgtcttgcttcaacttgtgcttgttctctgattggctgcttattattgaaacctcaattggtttatttgcatctgtgttcctgtttctttcattgttaggtcctgtagatttcagaatattgttgttttttttttcctctatggctgttataacgaggaataaatgagtctgataatctatcatttttacataagagagagattcaagtgcaaaatataggagtttggagagagggggtgtgatatgcacttacagctattgtaatgccaatcttagtgaagggtgatagcccatagagcccacagtctttcccaggaaatactggtaattttggagatatggagaaaaactttttgtgcactagtcaatttttaggatgctctgtatatcaatcaacaaagacaaaagtctggcatttagcaaaaaacaaaacaatctcaattgttcttgacacactgcttagagtgttgcacctctggtgttccttccaaggtttccttaaaacagaggtcactgtgttatatagcacagatccctgtggctcaaaccaccacctaaatgcaaaacccagcatccaaaggcagagtgcaacctgaagggtacccatagcaagtgcttaatccacttctagatgctaaataaatactttgctaccaaaagtatggtttttttcccccagcatcattggtgccaccttgagacttcttgtctatccccagattttcagccttaaaagccttcattttacaaagattctctagtgatcgatgtgcacattaaattttaaagactactgtcatatgagagacttaatcatttcctcctttctggggaacctgagtgtgcagcatggagaatgtctcaaacaccaggtgggaaagagagaggcataaaaagacaacactaaatagacagtgagtgaattcataagttgatggagtctgtggaggagaatgaatatgagaaaagttccattagtgggtaggcagagccaggtagatgtagacagtcactaagggcacatgcactgagggtgagggcagtccatgaaaatggatgctgagagggagctgcttcctggatgctgcaactgtgactacatctgaatagctctccattttccacacttccttaaagtgcttagattaatgcttttgttccctgctttcttgaaacttgtagaaaaattctcattagcctgggaaattttgagggcatctttattcctatcaggctgaagaagccccaaatactaaaacttatccctgatccagccgctcattctgatgcaaaggtatagcttcttagacagctggatttcaaaatattaatgctgtccttaattcctgatgaaactatttttaaaagagatactgagatttctagagtggtgactgaggatctgcacaatgcctcttctcaaaaatctgtcggagggacaattatttggtaaagcaaccatgttgagaatctggaaactggctaaaggtagatgacagtttgagaggcttttatgaagagtactgacccctcagttttagcagaagtaccctgtagcactcatcccctgtgttgttatatattatatatatatatatatatatatatatatatatatatgggcagtaatcccatgagtacacagcataccttgaaaatggagcatcattactaaagagggctgatataatctgaaacatagagtggaaaaatccccatgcctagagacattttcagataaaaagcatcttggtgacaagcaaacaaagctaacactacagcattatgatcatggctaggaaaaccaaaccaatagcaaattggccaaaattccaacagggaaatctagtgtaccttgaataaaatctcatatatccctgtaggtctaaagtctgtatatgtgtgaaaactttcacatagagtcgaaagctgtagagggtctctgctacccacacattcctggctgagctcgagtccctgtagcaagtgaaaaagagacatagagggtctgaaataaagttaagcttgggacacatttaaactgcctggactttgaatgtgttttctgattctgaacagattctctgcaaaaggttcaagaattgtagcctatcatgtttgtatgtgagtcctgattaattacttgaccactagactctccttacacagcaataataatcaagaagttaaatttgaaagtaaagaatgcactggtaaagactgaatagagacatttacattttagggaaagaaaaaaaatcactgaattaactgaagaaagccacaaaggaaatcactaccaatatcagaatatcagaatgaggaatcttcatggaaaatcagaattgagtcttggtgtatgattacagtttccatccttcatggaggcaaagaaaagccttgaaacatgtgaagaacaaaaatgtatgatccgtagaaaggggaaaaagttaaaagttgacagaaactatttctaagggttctagacataaataagacttaacaaaaagacagtctaactataatagcaggccaattgtggtagtgtgtgtctggattctaatactcaggagagaaagctaagaggatcttgagtttgaagtcagcctggggtaacagcaaaacaagttcaaataattaaaaggaaacaagtcttacggaatcacaataaagatgacaagaataacttgtcaaatagaaatttcgagtagagacaagcaattatcaaaaaaataagtaaggattactgtatttgaattatagcatcaagttttcaccaaaataagtaaatgaataaggtcagtagcagattcacggtggcaaaaggaagaaccagtgaacattaagatggatacagattactcttcctaaagaaaagaataaaaatgaatataaatataaaatgaatgagtcttgaggaccttcagggtctgctgaagcctcccaactactaaacagacttggaaccccagaaaagatgagagaacaatagggaaggatactatttctatcaaatagtcatatagtccattactcagctctgaaaaggaagaagggcttatttgggctcatggttttataagtttcaattcaaatccagctacctctgttgccttgggtctgagacaagagagaacatcatagaagcaggactgtgtgacaaaggaaactgctcattttatagcaatcagaaagcagagagcaagagttgggaaaggtaaagagacaagacatctcttttggaggcctgctcccagggatgcttttctttcctcctacagacccattctgtggtgaactcaccaagggattaatccctcaatgaagttagtgccctcgtgacttaatcacctctcaatagggggtggggagcaccttacagccagttaataacatccaggcttcttaacaaacttgcctcttgctatgtctaagaactgtctggggagtggggacattacctcccctcactccatataaccacagatgtgtatcataatgcaactgcagaaagtcaaaagcagctagtagagttggtacaataaaagaggacagagacagccattgagaacaatgggaaaacgtagatccttctatcttactgacagctgtcttacttgtaaaacaatgcatacacttttagaaacactttcacaacttcttaagtgaaaaaccttagaatgtaatcccattctccagggtcatttgtggtatttatatagaaaagattggaaactttacatgtactataaagagtttcacacactgttcatagcactattacccagggaataagccaacagcaatccatctacttattggccagtgaatggcaaatcaaaacatccaaagcaagacaatggaatcccaaagcatgcaaaaataacaagttaacagtgcagatgaatctccaaagcctcacactatggaaagaagtcagatgcaaaaggctgtaaattacagattctgtttatgtacagtatccagaaaagacaacaagagaacctattgctgatctcctcaggctgagcagtctgcaagtacagtgaacagtgaacaagagatttttttttttttttacctgtggtaatgggaatgtccttgcagttgtgacagttgcccctttctataaattcaccaaatagtagatcatgtaaatgtgtaaatgttatgtaagtttgacttaacacagcttcctgtcatatgcagttggaatagacaatgacatgatggtgtattaatggatttaaatgtgtttttggatctattggtttttattttctatgcatggctgttctgcccacatgtatgtctgtgtaacatgagtatatcttatattcacagaggtcagaaaacacatgatctgggattgcagatgagtataagccactgtgttgggtctgggaattgaacccagatctcctataaaaagcagccagtgttctttatctactgagctatagctccaaccccttaccagtggattttaatagcatggattttcattgtgggtgcaacttttgttgaggagaagccagtgccactgaagagtaatttattgcttatattttccaagagaaaggacaacctcatgggatgcaagatgtttagtcagaaggcagaacagagtacagaataaacagtttcagattgtcccatttgagcatttctgattgactgtggcatatggattgcttttcctggtcctgtctgaagattagatcagagcttggggaatattggcctctttggtcagtttgcaaataaaggtgtcctcacaaatgagcctgtttctttatctaagtatttcctgaggagatgggggagtctcacctcaggctaggtaaccacaaatgatcctatattaataatatcaaaaatacgattagtgtaattaaacaggtgatgcatggatgccaaataaacatatatagaacatcaggaaacatacaaaagagcaagaaacacaatgtcacacacaacttctgagatttgtgagcaaagcccagggattcatgcacagaatcaggttgagcaacagaatccaacagatgtttaaacacagagataaaatgcaccttgttatttttctgctgagtttcaaagaagactgcctgacatagaaacatagcagatcacactaatggtacaaaccatgggagtggacaaggctcaagtcacttgcaatggtctttttataggtatcttcccaacatcccaagttgagggtagtaactggcatttaaaacgagagccacaccccacaacacaaagcatggttttgtttttgtcacttgtctcatcacatctcttggggccaaatattttcagcttctttcccatctacactgttttggctacctcctttttgctgtattagcaaagagttacatgtatcttgatagtaataaaaccactcatgttacatcgaaatagataaaatagctacttcttcagaaaatagaatgtataacttcttttaatacttttacatgtactttgtgtgtgaatgtgtgtcatggtgcctgtatagagttcaaaggacaacttgcatctatttctatcgtagagggtctgggaactgaactcaggtcatcagtcttggcagtaagcacctttgcccatgtcaccagccccacatacaccatcttaaggtgacttttgaagtatgaagaaaataaatactccaagttatactatagacattttctaaatataaaaataaccaaggacaatatcaaattaaggagtttaaccatagctgattctgaagtgttttcctttttatttattagagtcttactttatgtgtttgaacattttgccagtatgtatgtctctgcgccatgtacatgcctggtgtcccctgaggcgagaagagggcattggatcccctggaactagagctgtgagctgatgtggggtactgggaagcaagttcaggtcctccaaaagagtagtatgtgctcaatacctccaagtcattactttagccccttaaattctttttctgagcaagagctgctgcaagaaaaaaaattaattgaagtggtcagggaggaaatcttgagatgaaatccctaatgttagaacaagtagtgttccagttaatataagagcaggtgagtaaggttgtgtgttatcgaatgggtgtgggtgctgtgaccaggtggactcttgaacttattatcagggttatggaatgagactatgtgtatatatgatgccagcctgagttttgaaataaaatgaattgcgatttagattctggttgccccatttactagccttggcttttctggtactcaagtggttcctcaggtgcttgtctaaaattattttctaggtaataattaaagtttttagatagaaagaccaatatatcccctgcattcagtacacaaaataagaaataaagtatttcaaagggatattgactgataaaaatcagtgctccttgacaggcatgtagctttttaagtgatgtctcagcctagatacacaacttggcaaaataccatgcacctataacaagggaaggtacaggatctacagtcctaccgtatgaacagtggaaggtgaacacattcgtgtttacctaggattatagacatgcagtatataataatattcaatgccctacacatatgagtgttgtcccatagcattaatatggagctaaaattcttattgttcagtggtatttcagccctcttaataaggcatgatgcattattcatgtttgtggagatgctgatataaacaagcctactgtgctgagagttattaaattacagcaccaacaattatgtataacacacatttcttaatgataataagcccatggtactggcttacatgcttactaccccacactttctattcattgctctagaataagtctttggaaaatagccttagataggttactcaggacacaaaagcattgctgtcataggaaatgagagctccatgcacctaaagacatttcagtgggacaagatgtacagggaaatgatggtgacactgatgaccctgaacacgtgcagacccagagtaatatctgtgtttgtttcacaacttttagcaaaaataatgtctaaagattttgagtaaaaagtcaacgcaaaccatctagatttgcagtaaggcaattgtgagaataaatcattgataaaatatttactaaggggaagaagtcttaattctatagcatctatgtaagaaccatgaataaaggaatgttttggttctgggtagttggctcatcagtaaaatgtttgccatgaaagcataagttagactccctagaacccaagtaaagcagggaatactatgaggaagtaggttgacccctggaactcactggacagagagtttagacaactgatgaactccagattcagtgagataccttatctcaaaaagtaagatagaaagtgattgaggagaacacctccataaatctgcatatatctgtgcatgctcatacaaacatgggtacatgtataatacacacaaaaaatatttcaatgtaccagatagcatcttctttcttctttgaaatagaatattcaggtacagtacttaatttactagtctaagtcacctatgtaaaacatggacaagattaccaatataactatacagtgtcctagcacttggaagccatccattttctctctccttcatgcattttgaaacagaagttaaagccttttctgcacaggcgaggaaatgattggtgcctacaggtcccatagctagtgcttagcagagcagtacctcaaagagggttttcctgacatcaagttgagaatgttttcctcaagtgccttacaactcccatccagacatgagtatgtttttgaacaaggctgtcaaggtttgcagctggtacctggctgctataatccacagctgtagcagaatgtgtttctgggtgacttaacctcgaggcactgtgccttcaaatcgacatcacagacctcaagcaaccttttaatctctcttcttcccagtccagattgctgacatctgctggtgtatctgccaggtcatcatgtgcacagcaaagtgaggagatgaagtagagattgaaagggaacaaagtgcaccttaagaaaactagtgttgttctggcattgatgaacgtatcagcagccagtaggcagagagtggaaattgctccaggttaaggatcactcggccaaaacatgcattttaagtgaacatagaagctactttgggatggatttctgtggtatgtgaaatgtttgctcagaaagaaagagcattttttacactgtggtttcttttatggggctgaaatttaatacttagctagtgatgttgccatagaatgagtgcttaacaagcttgagacagtctgctgtgtaaacagaagatcagggtacatgttattttctttcctctttatctccctcatctcatttttagaaattatggaatgtccaggttttgtacacccatgtatgcaaagtaggaaatgaaatgaagccggtttgcagattctgattttctggggaaaatccccttggatttggaaatgtctgttactgctacaggtggactaagaagatgcagagagcatggccactgagctatttgtgtcttactcctcctgcctcacacacactgaaacagaagtttcatttaacaaagcaagtagttgtttgtaagacatcacatcatgaaattttattagttctaatttccatgtagcaagcaatgtaatcactcttttaagagaccttttattccaaccaggtgtctggatatcttgggctgtggctgtggctgtgtttaccaagggtggcaattgtaggtatgtccatgacactgcctgaaaaggaattcggtatgaaatgaaccttatgtagcccagcttccatttattgcacagtggttggcagcttgggtgtgagaaatcaataaacattttggcttgcaggggtgttaagtggtttatttattttttaacagctcactgatctttatttcttgactttagggaaatactggcttctatttgcatttcttgaactttaataggacatgtttacaggtgagatgtagtctccttgagcagatggctagtgcctagcagatgctagaagccagggcatcactggctctaagggtcacttcaaagcaaccttgaccaccctatatgtgatctaaagccattttaagtgcctctgagcacatacatggatgcctgagcttgctcttacttttcttgacccatggtcttatgaaaataccacttatgtttctagggtgtttacttgagatcttgttctcagtgtcttggttgctagcatagaaataacctttaaagacagtgagcaagtcttggagaatacagaacaaagactaaaaatgtaagaaggttgggacttgtttgctgcctataaacaaggcatgtaatctctctaatggtctgtgaaacaaaggcagtaactccttgtattctgctttgagggtgtagaaagtccatctgtaagggtttcccatcacgggtgctgacatacagcaggtgcaagtcatcaccgctgccgtagattggtggtgctgcctgtgtctgggaggacaagcataaggaagaaggcttttgtgtttgcatcacatgtgtatagctgagtatgtaaagaccagttatagagttctcacacatatactgttgcattctgcaatttctaaaatacttgcagcttgttgattctttctcctttctagggtgctttgggaaactgtgtgactaacatcctgtgagcatgagcaggacattacaaattgattttcccccttattgtcacactgaaaaatggctgctaatgaattcttaaaaggagatagaggagcatcgggtccactaatctcaaagcagcttgaccatatggatgtgcttgaacacaccttactctgagctttcagaaccaacatgtttcactggtttgcttgcatctgatcctaaggctgcatacagataaggttaaataatgaactcaaccaagcttctcacttgcacatagtgtctacttatcttacttctgcataaaacatccattccagaaccctaagctaaattcttttatccatatcagaagaatccagaacatagtactcagaatagtcaactgactttccagatgtcctctgaatcggagttgccaatcatgacactagaagccagtccctttcacctggaattgcagggcgtcaccagatggcatgacttgtcttccatctctctgccaatcacttgctaaactatttttgttttatccctgtttgccctgtttgcctgaattctatcctttcattggggggtcttatcttttactttatcagccacctaagagaatgatttttcacctttaatttaattaatatagaggaatccctggggcttataatgtagaatgctttgatcaggtcttttctttctttcttgtttagtgatactttataagtaaactgcactgatcatgttacctaagccatattgatgttcttcaaagtattcttagaagctcaaatgagatcatcacaagatgtgcaattattcttcaaagtgtccaagattgcatgggacaccaaatcttaccttcctggtcaatgcagtgcctagcagtggatattctaatctgtagtttcctatcttcctgtgtatttttcttacacaacacatttttcttaatagtaatttccaggaagatgtaaactatatatttaagaccacattctacactgataatgagcagaagcttccaacttacttaatttaataaaaataattatgtttctaaaagttaaaaatgaagcaaacattttaacattgcaaaagaatcagcagacaagatttcttcccaaagagtctccttcttcatatttttaattgttattaatagcattattgctatttatctgagagagagagagaaagagagagagagagagagagagagagagaaagagagagagagagaggtggatgtatgtttgctagcctgtgtgtgtgaggattagaagataacttctgggaataagttcttgccttccataaatcaaactctggtcctcaggcttgaattaacagggaataggatgatttgtacttcattaatagattgaaaatttatagttttctttatttctcagattgtgtttcatatttgcaatgaagaaagttggttattcacttttatatcctataatcccagaactcagaaggctgaggtaggagggtgtccataaggtgagatagttatagtaaaagacactatcctaaacaaagaaacaaaacagaatagtagagagtccttatacagtttaatctgctataagtattgacacattatcattaactaaactcattttccattacttattaagtttatataatgtacttttcctattcctggatatcattgaaggttttgcatgacattaaattttcctgattccttgggttcctaaagactgtaatattttcttaggcttttttgttgttgttgtttacaatgatgaccttgactgttggagaactatcgaggaagtatttcataaaggtagtcatgggggctgccacaacaggatcatgaattcaaggtcaccctgaactgcatagcaagacctgtctcaaaaagaaatgaaaaaatatattttatagaaagttcctcgattgacatttaccttcatattaggataggttgttttggggaggaagaacacagaggtggaacatcctttgtatcatattacctggaaactgcacgccaacgatatgattcattgttgttgagttgagcttaatcacctatccgagaccatatttcttcaacattcacttacaccccttctctaattcagattcgtttagagccaatgaaggctctttttcagtagctgtctttccatttgaaattctcaacacttattccttatgattgccagatctgttgtacatgtggagcttcaaattataaacttataaattaatagttgcacagattaaacagtagacttgaatttttctctggggaaatatgcagattaatcaaaagcactgagaaccacctggagccaacaactaattgacaattttacaaaaaaatctaaaagaagtagaaaccaacctaattgtcagtttcagaaatgaattctgaaacttattagatagaaagcataatctgtgttcaaatttaaaattccataaatgattttactatctttcaaaaccataacttttgccttcgatgaggtgggagatgttcaaggtactgaaagtatggttcatagctcctcccccgtaaaagccatgccatattagccattatatagtaattgtgaatactgcacagctttgttaagatgaagtaaaagacattagaaagtgcttttaccccagttacctgaacatccatgtttatagcttcagtattcacaaaagcacagatataaaatcaccctcaatagatgatagccagagaaaatgaggcaaatatatacaatgaaactttttcagctataaatatgaaagaaattatgacattttcacaaaaatagatgaaattagagatcattatgtaaagcaaagtaagccaaaccaaaaaaaaaaaaacatcatgttttcccctagatgcaaaaatattggtctatatatatatatcacattataatgtaatttaatatataaattgtattgttatacattacatctgcttttaaaataagtatgtatatctgcgggtcatgaatatgaaaggaatatagaacacagtaagaggactaaaaagaataagaggaaaaaccaaaagaacgtaccagaatacatgtgatatcaaagtgagtggaactttgtgggagggaggtgagtaaaacagggaggaagaagactgtgcatgatagataagggtaaagtagaaacgcacacacacacacacacacacacagctcacaacgacatccatgtctttacataatagcccaaaattttaaaataatgaataagaaagagtgcttatctttaaatttttgccttactgtattgttcagctactggcttcatcactatactaatgaagccacacttgtcttctgagaccctcttctctgatggtagaattgccctactgtactccccctgctccaagttagaaaactcctttccagcctatgcatatcaggttattgttctacacaaaagcaagatctatgggactctgttgtgccttggatattttttgctttctcatatcctgagacctgctccccaatataagtgttgagagttgttgacgttttatgaagtgactgagtcttcaagagggattaatacagttctcaaagaagtgagttagtttacggagagtagactgtaacagagcatttgacccacttttcacccatctctttgactttaccatgacttaaagtggcacaaagccctcagcagaagctgagcaaatgccagaattatgctcttggactttcagaaccaagggccaaaataaactttcttttataacttacctggcctcggttattctgagaaacaagagaaaatagactgctacagtcaccccataacaagcaaacacccagaatggtggaactgctgttatggggtgtaacccccccaaaacaaaagactggctgatttcacatttcttctaatgttctaatgtatttagaacttgtttattatgtttattttgttttcgatttccttctcctttgaacattaaattaatattgtttgccctcaagaaataactggcttttagtgaacattatcttgttaattttttaatgttgtattagctttagtgatttagcttaccagattcttgagtgtgtataaatattagctgttacaaaaaacttgggtgaagcaggtaaagtgtcatttttgtttgtttgtttttactttttaaatttttcatttaaattaaaaaatcttattttacatactcatcccagttccctctccctcccgttgtcctcccatgctccccaccaaccccctcatgccatccaccatctactccccagggaggatgcagcctcccatgaaggagcatcaaattttttctccatcttttatttaaattagaaacaagattgttgtacgtgtcaaccccagttccctctctctcccctcccctcctgccccccactaacaccctacctatcccataccatttctgctccccagggagagtgaggccttccagaacattagaagaaatgtgaaatgagaaaacacggagtgtctgatgggtattagaaaccctgtgtgcctttgtaatagaagggtagcctgtgtggtcattgagaagatgctgaataagcagaagttgtccacaggtatggaggttagctagtgaagctcttatggtgactggaggtgggggtacaggtagagaggggtattatgacatcagaaagaaatgacagcacttcagaaactcaggaagaatttaatcttgtaagactttgtaggccactgtgttatgtgtgggtgatagtttaaaatcaaagcaggagaggacattggagatatttgaagagtggtcagggatgttctgatttctgtatttagaaaagatttaaggacaagggctcaatggtagagttgtttgtttgttgttagtagtgcaaggccatagtcaaaaacccctagtagagaaaagaagtctcaaggcagacaaaagaaagagtggggagatggcagatataaataaataaataaataaataaataaataaataaataaataaataaataagactggctgcacatttatctttgtagatagcattagcagcttttcagggattcccaaggcaggatgttctcccagatctatctgcatgctggagtgtgaagaacccagggagccactccaaactattcacatttaagtgaaatttaagtggaaagctaagggacctgggtggaacagtgaagaaagtgtctgtgtgttaagcaagatgctagccttcatgatcccactaattataacagaaaaaagtctttgttgggcttcaagaagtcttcgttcgtttaaaaatgaaatactggaaattagatttaactcccacaagaatttttgtgtttcttttaggtaaatatttaagacccattgtcatcacagggttttacttgaaacttcccaggaacacttttttccaaagaatgctgaaactgtggaaagttaaaggactatgcagccagctccttacttccaaagccagaacaaaaattaaattcttaagacattgagtgtgatagtctatcattagtgctgcattgtatgcccatctaggttttaaagtaaaaaaaaaataaataaatctgggtaaagtacaaataatatgtctgaaaattcggaattcttttcagattagagaatgtaaagtaaggatcatagttcttctgccttaagagtcaggtacagaagtattttgagagattacacaactcagcatatcagagcggtgtcagcactagcctgagcaaggcaacatggttgggttgaaatgtatctgataccactctataccatcagcaactaattacaacattggactagtttgtgattactatagattctgtcatttcaacactggccaaaggttggaccttccttcttgttattctaatgaaagtgcattgctttgcctatgtcatcattcagcagacacttctctacagaagggttctgtttctgttctactctgttgttgcttgccatcacagtcttcagttcaccaagaagggaggaactaaagcctgaaaaccctaagatccagttgtcattcttcagtggaccatctcaaagttcatgtgttttgacctttcacccagatattttgtgcatttgtgagaggaagagtaaagtgtgaggctttcactttgatatattaccttgaacatgggaaagggagaaaagatgtaagaggatcattgctggtccaaactaagacttcagttcttaactctttttttctctgcttgattttgtccttttatttttagccatacttagatgaaagtcatttcaaagctctatgaactcccctcccagagcacaaagccaaaattgctcagattctgactttgtgtcagctattctgaggataaggtattgtcttagtctgtatctgagaaagcagcaaggatgccagcatactgttagtccctagcgttttaaatgttttgcatttatttagcgtgtgtgtgcacatatgcacacatgtactggtgtgtgttggtacacacaagtgtggagatcagagtcaattctctgcatagtcaattctctcctctactatgtggttccaagcatcaaacttagcttgtcaggcttggtggcaagtgcattcacctgccaagcctccccgccaggagtagcactggggtgaggaggagcccaaaagaagaggagtcatagaacttgaggtccagttcagattcagccttagaatgtttgtttttcccaaagctgttggacttacctgacctaatttttcttgtctataaaatagagatgattcttaagaactagacagtctgagggaacagcccctctgcgttgttttcttcctctcatccctctttagccaagatttataattatctccatattctctcctctctagccttaggtatccagaatcctgattcttgccttcaggcaagaatcttttggatttcggcatctgtctttcactgaattcatatgagcacattagacttcacttcagtaacattaataatcttcctagctgaacttatctagagttatttatagttaaaacctagggagaacgttcaatattttcaccagaaagtggaaaaatgttcattcatctgaatggatagctgtgcgaatggacactggttggtcactcatcctggtagattacggtacaaatagatgctggtctgtgtttatagccatgtgaatggacattggtctgatcattcatctgggttgattaccatgcaaatggatactagtctgttcattgatctgagttggtcaactgtgtgaatggacattagtctggccattcatgtggttgatgtgtgaacgggcactggtctggttactcatatgggttgattaccatgtgaattgaaagtagtatgatcactcatctggattaattactgtgcaaatggatacctgactggtcattcatctgggttgatgactgtgtgaataaacacgagtttgatcaaaactttggattgataactgtgtagaaggtcactacaagtgagtcaaactgtcactcctggagcatcttctacatacaaagtcaatgcttgtgtttgagtgctcaagttttcagatttcactttattcttttgtccaattttgaaacattgcacatttttggtcctggttatcaataacagtagttttaattgtgtcaaataaatgtgaatatttaaagttaatatatctaatcatttcactaattttgttggcggatctatttcaaaattagtgccataaccggtttttcctgaccctacttcttctcataaccacttgtagtagaagaatcatagcttccctttcatatctagaagatatgaatttattagagcagacttcctggtcctctagaccttataatctccattcccacttccccagtgttcattgaaccttaggtctaagggttgtgttatagaatattagtgagactgagcaccccaagatcagttgtgccttatattttgaccagttgtggttttcctgtaatggtaagcttctttgatgaggagtgagagctacacttacctgcatatgtaagaatccacatttagactgcacttaggaattacactgctttaggaaagtggcggttgtgggttcagcactaagatccatggcctcactagccatgggcagctggcaaggtttacagtaccaggcatgaattctctaccattgagcaaaacttaagttcaattagacagctgttgattactgccaagatacgatttctctgagacttgggtccaaaggctttccccttttctccattcccaccaacccaaatgtggctttgttatttactttatgagcttagtttgcttttatgggatattgtatgtgttctaggtgatcctgaaggccaaacttgtaaacaagtggaaattatctgtgatgctttaagacataggtgttatggtctcacccactagacatcttggttaacttaacccaagctaggtcccaagcattgatactggaaacactgtgtagtctgcctaaagaacatttggtaacctcctataaattaataaaagttcttatctattgcaaagaaatcacttcaattgatcagaaaatagactcggtacatgcagtacttactagaaatgcctctttctttagtgggtgacaaagtggttttggaggaaaaaaatatttttacataaatattcatggtcacaggagaatgaaaaaagtgcctgggggtaaaataaaaggcaaggcaatagaggatttaatttttacactagttgtatattgtaatagctagaaatatttagctttagaaattacctgaaattgggagattccaaggaaatagtgaaggcttttgagtggtaggctctggaaagaaaaacatgtcatgcaataagctggcaggctatgtgggggtctttgaattagaagcaggggtagttgtgggaggtagggtgtgtggggtggaggtaaacggaagtcacaagcaaagaccaagggcagaatctgaagacaaaagctgaatatggcatggcatccctcaccagctcagtggcctgggtagaatctcatacgatagagctcaagtgaggcaattccttcatccttcactgggaccatgtcgctgaagacctgtttttatctttagataagaaaacagaacagggtaagtttgcatctcagtattagcatcttgagtactccctgcacctggaagagcatgtgaacactttgatgtcagatataatttctggctttaacagtattttcatttctaattaggctgaaaacatggactgttaaagtcacatagctacgatggactgtagataaagtaccacccatttggtttgtatttcataaaagtacacacgtgtttgtctttctcctctgaaataactttaaaaaaatgaaagacataagggatcatccaactaatgatagagacatattgggaatcatgtggaaactgaacagatgagcttggagtggaattgctgaaggaagtaatgctgcttttgatggaggatgctacggtgcatagaccattttagattatgacaatgaaatccccaaggaagtctgaatttgaaagaagtatatagaatgtagtctactgttttggatagtcaactctgtggcactggcttcagcacaactctgaaaagggcctcttctctgtgttgtactgtgactttgagagaaggtgtgaaagagagactgttcctacaaacccatctgaaggtatgcccataatttccagaagacatcacatcctaagagttcatcaccttctctcatcacaataagtaccaagacctttcagtgactggacaacattcaaaccatggcaaagagtggaaatggtttacagtgacagtcacctgagctctctgaaaggattgaaagtttctttaatgttcaatagagtagctactagccatgtggaacatttgagcacattgataaatgggtagtggaggatgctcttctattttatttcttgttaatttatgtagtttaaatagccattctgttaagtaactcctatagcagagagcacaagagggagttaaaaaaagaaaattctttggacactgagcaatgaagaccttgaaagcaattgtcattcatgattttatgataccccacaaaacacatgtatgttcacagttcaaatatgtcacacacatcacaaatgaaccaggcagggttttctttccaatgctttcttttaatactgtttctgttgattatgttaatggaaatgagacttcgataactataagtttagcctgtcagaggaatagatactgtaattatcacatgatcgaagaaaacattttccaaccactagcacagcttggtataatatgttatgtgtcccctttaagttaactatagtagaaacagcaaaagcagattttgtcacaagggacatctcatcaagtagttaatttgtagaaaaatttcatttttccaatttgaaagaacagatggcctattcattaaaattcaaaagtagataattacttgattccaatattttttagcaaaaggacattttataacattatgtttggggaagactcataggtcttcaaatgttttgtgtgactggacacataattcaccaactataactgcctgctctgctaactgaatgagccagttaaaaatagcctcgtaactccatccacattgaaatattcgctttaaaaaattactcatctctctgaagaaatgtcttcctattaacctcaaacccccattcaaacattcatcagcaaacatttgtctctcactatcatgctgaagacttgcaactggagatggatgtttggcaagactgcacctgctcggaagaagggtagtccaaatggtgaatgctgaatgattgaagtaccctgggttttctttcaacttaatggtattctacaactttttctcatttaagtagttcaataaaggtggatatttagtcatgcataacagagtgttcataaatctgcatgggtagagtctgctgttgacagtccctcacctgcacaataatgatcattttgaaattctccaaccactcaagctcagaatttagttcagcagaggtgattttcgctctccaagataatgcaaaatgaaggagaaagaactgatttgccaaatatcattggttactgggaagctcaagggaaacttacacgtcactacctcatcaggaaaaattttttatctgcttctgtctcatttgtttcttggttagaaggtgttttctgtaagaagacttgaacatggtggggtgggtttatgaggacaacctagaggaatggttttcaccttgtatgtttgcatcaggggcttttgttgttctgctctgcttatgtcaggccaactagcccaggggctttggggacttctccctctgcctctcatgccaccatatgcacactgggattactgacatgtgccactgcatcggggtttatatgggtgttggggatccaaacacaaatcttcatgcttgtgtgtcaaatgctttgcacactgagccatctcctcaaccttgtaactggccttctactgcaatctatcccaatgtctttcaaactcaacaatgcttttccttaggactgtgaatgagttcatacctggggagctgaagatgttgatccatactcataatatttattaatagttgccatgtaatcttttctcaatggtcaacaaagaagtgataaaatgagggagattttttgtctgtgctattgacttctttgtgtgctgaaagcctgcctttgactgactcatgccaataatatactttaagaaaacaggaatcctggggatatctggacaggtcccagggaatttatcataaatgtgtttctcctatataaatctaacctcccaggcttcttctggacaccttactctacagctcatcatactctgttactgcacatggaccaaaccactattgaaccctactgcttatatttatgtgaaaatgataaggggtttatgacagcgtgttaatatcctttgatgctgatgctacaaaaagtagcacatatggagcagatttcatgaaacatctaaaaataaaagaccaaaatagaatcgctgatctagaaatctttattaacaaataagaattaagcttaattaaaccatctaacctaataagttatgataacactctttttgttacaaaatttcccaggttgtttaatcttttcactaatgaaaagtggctctttttagcatcttgatttttgcttgtcttcctgtgtgtgtgtgtatgtgtgtgttgtgcaatataggttaaatattagtatgtcaacgttaatctcctatatctggcataagaatcttccaattttgctgtgccactaaatgaatatatatgtgagaagtgtggagaactgatacaagcttttttgctttggtcttactaaacagctttactttctttttttcctttctctccattttttatttaaattagaaacaaggggagtgaggccttccatatggggtcttcagagtttgtcatatcctttaggatagggcctaggcccacccccatgtgtctaggctcagggagtatccctctatgtggaatgggctcccaaagtctactcctatgctagatataagtactgactactacaaaaggccccatagatttccgaggtcgcctcactgatgccgcattcatggggtttgggtcagtcccatgctggtttcctaggtatcagtctgggaaccaaaagctccccctagttcaggtcatctgtttctatgggtttcaccagccttgtatggacccctttgctcatcactcctccttctctgcaactggattacagttcagttcagtgtttagctgtgggtgtctgcttctacttccaccagctgctgggtgaaggctctaggatggcatgtaagtcagtcatcaatctcattatgaggggagggcatttaaggtagcctctcctctgttgcttagttagttggtgtcatcattgtagatctccagacatttccctagcgcctgacttcaaacaactttactttcatgttattatcctggaggtttctgctagccactgacatcttttatgactttacacttttcccactgagacatgaacctcaaagtctgataggacaacattaaaactaaaggcccatggcttgtacaagttttgatgatgtacaagagaatgtagttacttagcatttaaacaaaattgaaaactctactataatagaaacctttatggtattatttattttgggagttttaatgtattagaaacctgaactttctgataacatcatttatgtattctcaccctgatgctatgagaaacattattgaatggaaacacaaatttaatgcaatatctatctatcattaattatacatttcattaactttaagtgcagagggttttacttttcatctgttaatagtcactaccttgtcttccgtacaagtttctttcattaagtctgcttctctgcttctgtggtagcaaagaaaaccagtcccccagatgagaaatccttaaattcttgatgtgagtcagttaatgaacaaaaacttggaagaactaagacaaaaatctgagaagtaattctactaaaatttgattgaatcaaaagataaattatttaggccatttttaggtaggaacaaattattcatggatactctgagttgttaggaataatacctttcagcagaaattagttccttaaatccattgttgttcaagaaattcacatccttgtgaatattttaaacctgatggtattgcattaaaaaattattaccatttctttctttagtaattgaatgtgaaagttattcacataaatgtatagaagccagttttcccaacacctaagctaaattttaatattttcatttacatgtcacatctaatttaagttttacttttcctaagtagtgtatctattttgcttgaatttttcttcctcactacacttgtgataatgcaacaaaacattcccttatcccttttgaccacagaagtactaataatattttttattatagagaggtaaaattcatgatatctaactcttatgaattaattcagctaactaggaaaactgaagttttttgaaatctgctttctcagacaaattctgggtcatgagttaaatttgctaatcccctggaaagattgttcaagaagaggcccaaagaagtgatttttttctaaataaatttctgttaaaaaggagaacaaagtccaatggaatgaatatatatatatatatattatatataatataatatatatatatatatatatgaaaaacctaaagacaacatgaaccaatacatagttgtggctaactctttcaacttcgtggaagagttttgtagaaagtagaaagtgtgatcctccaggtctgatctcacagtgcatttagggagttgagtagcaacagtgatgaatgggaatgggatactgtgtttttttttttttttaatgatgcttctgtacagtggcaaatcaagttaaccagtgaaaatgctgtgtgaaatgaacattggaggattattccattagctgagatttcttcaaggatgaagatgccaaggatgtctttgaaaacctgatgataccaggtgttggtggagaacacctttaatcccggtacttgggaggcagaggcaggtggatctctgtaagttcaaggccagcctggtctacagagggagttctaggacaggctccaaaacaatacagagaaaccctgtctcaaaaaaaataaaataaaataaagaaaccctgatgcctagagagctagtattgaaatatttgcaaatgctttaaacagagtattttagaatatataaagcaaaccaattcctttggcaatcagtagtaaaaaatattttctgaattgtgattcactaattgaggcttatttttttttatcaagtacattaagtaataggacataacaatgtacctaataatgatcacaaattttcaatagggggtatgaagatacccagaataattgtcatatagtaagaaaatgtttctgttttgggcatagcaatttctgttaagttaatgtgaattattactatgaaatactacatttaggttaaaggttagtaaaaccatcctgtcctttttcttatccatgttcacagatccatgaattatttcaagctaagtgcctccgagctaggctgtgaagcctgaatgagaggatgacaaggattcagattcagcctaatttagaaaagattccagctcatgggaacactagaagatctttgctagcaattagaatttgactccagaaaacagtttaaacttcccagcatgggattttaaatcagaataatagtcagtgaatggagcctgttctctttgagaaactggggaaggagctgtattcattgctgttggcagaggcttaaactagattttcagtctaggaatgcatgttaacacatggacggaatccagccacaggaagaaggatttgtgccatcagccgcatgacttagctaaaggtgatctgggtactcttttccacagagagaagtagggaaagtttagaaattaatatgcgggagatagaagagagttggtggaacgtgttgattcagaagagatgttgttgaggaagtgtgagaagccaaatcatctccaactcataaattctcatgaggaaatttatgagttgtgcactaatcttatcactgagcaatcactatgagcctgtattcagtaatcactgttaacaacttcattgagataatttaccaccataccatctgcctctttaaaatattcaattcaataattcttataatatttacaaatctgttttttcagcaccagatcttcagcaacttagtctttgcatctctctaaaatatactctgaccattttgcataaatgcagtaacaatgcaatacatactttgtttgtcgtttttcactatgcttccaggttcatgcatattataacgtgtgtcagttttttttttaacttactatgactgaataacgtttcccattttggtaagctcttaatcggttaatgaaactgcatggtttcattctctttgactgcctactaaataagtgttcatcgattctctttcaccttcagtttttgttgttgtaaacattattcttaaattaccatctcaggggcaagagagatggatcagcagttaaggacacttggtgccccttcggatgacctggttcaattttcagcacccagtgccctcttatggcctctgtcagcaccagcacacatgtggtatatgcgcagacaagggtgcatacacataagtaaaaatcaaaataacccttaaaaatcatgttgattttattctgcctacagtggcactaaagataaaaatgtatatatatttttaatgtgtaacagcttcccagcctagtcctttgacttccagtccagcaacctctgatcagaacaagttcaaagactgtcctttttgtgtttttgtagatattcagagcattttgaaatgtgtagttactcttgtttttatctgttcccttaagaaatgtgagtgtggatacacatctgttatgtgttctggggaatcctattcatgtgtagaggggaaaaatgtgtatatcacttcaaatacagctattgtaggttgtcaaatataaactcccgtggcaggaaacacattttagcactgtgagatttatagtacagtaatggtacatatatgtttttggtaaatggaaagagggattggcactgccaggtgtttttcttgttctgggctgtgtaaataatatgaaaatgcagcctttaagctcaagtataagaatgattacagtggggggtcactaatactcagtatttatctataagggtttactattccccagctcttcagaaccacataccagaaactgcttacttacttcctcacctggtgtgtatgtttacatgaaggctttgacatacctaaaccttcacctaaattcatgcattcatcctgtagagttgtggttatgatctctattgcactgaagcagaactctagagcagagagatccagtgtatccaaaactactgagccctggaacatcagcttagaacttcagccttcaaaactgtccccttttcttttgcctcatgggagccagtataaatctaagtgaagtgtcaaatggattcaggaaaaaacagaaataatccaagtgaagaaacatcacttgagacatagccttgaaactgagagagaaaattagattaagtacccagttgacattctgtgagaaggcaaacaccttctcctaaaatggctgaaaattcccaagtccacatcattgcataattacttgacagccccacaactcctgttgccataagtttctctcacattttgactcttctagtgtttactgatccggagcaatggatcttcctaccagctttaacctttcctcaaaagtttcctgttactatgaagccaactactaagagctggagaaaggagaattacatttcttctggcaacaagcaattggttgttcaatggtcactcatcttttagaaagtccttgagtgcaataggtttaaagagacatctggcacttgggaaatgtccagagatctacaaggatggcaccaattaacaatctaagcaataatggagaggctaccttaaatgcccttccctaacaatgagattgatggctaccttgtatgccatcctagagccttcatccagtagctgatggaagcagaagcagagatccacagctaagcactgaactgaactccaagaatccagttgcagagagtaggagtgatgagcaaaggggtcaagaccaggctggtgaaacccacagagacagattacctgtacaagggggagctcatggaccccagactgatagctgggaaaccagcataggactgatccatacctcctgaatgtgggtgtcagtgaggaggcctgggcaatctgtggggccttttgtagtagaacagtatttatccccagcatacaaatggactttgggagcccattccacatagagggatactctcccagcctagacacatggggggagggtttaggccctactccaaatgatatgacagactttgaagattcccccatggaaggcctcagtctccctggggagcagaaaggggatgggataggggattagtggggggggggcagtggaggaggggagggagaggaaactgggattgatatgtaaaacaagcttgtttctaatttaagtaaaaatagaaaataaaaagtcctccagcttatgcagtgtgactttctgttagccttggatgttagcttcttacatgtccccttgttctcttcactgtctctgtttacttctgtcattgaggagtcttaactgtcaccctggtcttcctctttagaactacttcaaagtatgtttgtttttctttcttggtttttaacttaaatataggaaatttctcttgaaaaattactgttaacttactggtttttttaatcttagagaatgtatcatctagttcagctcttgtaatcctacaatataacatagtactgtgtgaactctctagtgagataattcaggcatcatgagttagataacctcatatcccatagccagtcagtatgccaggatgaaatgctcaagtatgtttgtaaaacaaatgatgccaccctaactttagtattatagttttatgaaacttctttagaaatatctgggattattttctttttgctttttcaggtgatacatgataagaagacttatttagcaaagtatcattatggcttcattcaatggtgtcaatcttgttgcccaacgttgcataaaaccttgtgctattatttcatttgacttgtaatttgtgtctggtgaaggttaaaatgactttcaatgaaaatcaaacttttccccacaaatgtagaggatttattcattcatgtgtgtactttattttgggcttcctcaataccatcacaactcacaaccaccattgacattttgggctgaattagcaggatgctgtactgtgcattacaggattctcaaaagcatcattggtatctgtgcaggatatcactccagttatgacaactcaaaatgtccccagtcttggacatatattccttgagaggtaaaaaatgcccccattaggaacattgcattgaatcacaaattcttgaaaggtaaattaaaatgaaaaacaaatgaatatcatatgactatgtcaaaatctgacaatggtagtgtccttgtcatttttctgtctgtaaagaactaaagaaatagttgtttattgatttccctcttccatgaatatataatatatatgttatgcaggatcatgtgcctgtgtctgcatttgtggaagccatagaaacatgctggttgtcttcctttatctcttgtcacctcattttttgagacaaagtcctcaatgaatctaaagcttatcaatgaggctagactggctagccaataaggccccctggtcttcctgtcctcccagtgttgggatgataggcatgtgctaccttgcttggctgttagtgggtgtacaagacctaactcatgtcttcatgtttgtacagcaagcactttatttcctaatccatctccccaggcctctgttcggtgttgactgattgaagatgcccatgtattatagaaacaatgggacaagactgtgttgtccattgctggaatctggtttaataaactaattgaattgagaaaatcctcttgtccaactctgagttcaagaatgaatattctattcccccttgcttccctttgtgtgcacatctttcctcttgcctgtctttagttttcctcatggctagaagttaaaaatcacaaccatttatcttgagttctctgtgtattttgctaggatttcaaagcataatgtgtagaaaaaccataatcttgatcctggggaagaacattctagactttgtctatgaccaggtacatgactgacccatctgtaataggtccagaaattttctttcacttacatgtctctgtggacagaaattctgcaataccagattgctcagacagcactctgtagccacctatccaaattgctcaaatgtcagtcagtttcccacggggtggggcatgtttatgtgccacatgatgctggaattggaaacaaaacaagcagaatagaaatggggttcagataccttggagtgtgccttccctgtctgcacttttaactactttaagttctgcagagctcatgtatgtttctgattctgaaactaatgattgttgtggttattgtattttggatgcaatatatttgaaatatcttataacttagcacaataaaaagtaagtcaaatatatttattgtagttgagactaggtaggaactcagatttgcccaactgaagtagcaaaagcagaagtcttcctgtgtggaaccccagtctctgcaagcctctcatgctttaagtgagcttctgttacactggataatgagcactgtttatgcttcctttaaggagcatgactatgagatagcccagtgattaagagcacatgatgcttctgaagaagacctctacttggttcccagtacccacacagaagctcacgactgtcaatcactctagttccaaggaatcgtctgctgcttgaccataggctctatggtcaacaagcacacacatgtttctcacttgttggcaaaacactcatacacaaaaaataaaaacaaatcttaaatgtatattgctatgatatattaagagggcccttgaatggcaggctttgtcataataatactctatgaactttaatggttatagaaaccatgaatgcaaaaataccttaagaaaactttggtgtgtatgtgtgtctaatgagacactgattagaaatatagaattgactagtgatttaaaacaaactttgaaagaaatatataatactgaattgaaacaaagcagcttcacacagacatttattcagtggcaaaaccaaggctttataaatcatcaagtttaatctcttgaagggagaacatgtcatttaaggatcaggaattgagatccagggaaaccacatttattgggatggcaaagcaatcttgaacaggtaccagataggttctgataccctgccatgccttccctcataacaaactcacctcttactggaaaagctctctctgttttttacttgtcgtggattaaggaagatgtgaatgccaagtacagagagaagccaggtttctgtgttctgttcctgggaagtgtatggcttctccttctactaagccctatgactgccttgtcacttcccccagtgatagcacctctgatctaaaatgaccctacaagttagggctgaaagaatctttaactgattgtgcaagaagaccagatatgaactcctctcccagaagaatttgtatctgtgctgatggcaacacagcttaaacaccagaatgttgaaaggtctagtaactacagaaatctttatcagaaaacaagtatcttgtagctacagcctttagcttacaaaatcattaagtgcacactaaaatgtttgggaaggaagaagggaggtgtggtctaaatgggaacttcgatataatacctgttttattttaatggccaaagaagctgtcctcaatgtgccaaccaagattgctgtaactgagcagtgttcataatcaggttgtgaacagccattctcttctggctggcagtaataaatcgctaagctaattctacttatcatgagaatccttatggctcaaaaccctacagtaggaaaaaacccaggataaacaaaagcaggggatttggcgtctctttataaattcagtttctttctttctttatttattgacactcccgattcttatgaaacatagacaaaagcatagatgcttcctaatagctctcttagcactttgagtctccccagggtcatgcacatagaagggtgccaaaagcagaaggcaaatcaattgcagctacagtgtcaggcttaggatacatgactcagcctgtttcagatcacaaataggcatctaaagtagaatcaaaaatgtattcaacattctgtgatacagctgtcaattattcatggtggtggcaggaataagaaaaaatgaaaccataaataacattgaacatgttttcacccaccagttttaacctcttatttcaagcaaaacatgttcacaatttaggaaaatccaaatgactagtatggtttttttgtatatcatatgatgaccagaggacagtgaaaccaatagcaagagagtatcatgttatgaaaaaatgaaataaaagagaaggagcaaagtagagtgctaaaattagctagatattttaggtttattggtaaatactgataatctgtaggaactcatgggattagtcaaagggaaggaacattttgaatattatagaacattactaagtagtctgaaaaattacatttctgctactctttaagaagtctggtttgaaatttaaaatatttgagagtcaaattaaagtattaaaatagttatgaataaatgatgattaatttcatccttgttttaaaagaaatagaagttatattcattatggttgacctaaagggaactcaccaagatgaatcattgaatttatttaaaatattgtaatactatagaacttccagagcagaccattctatgtttaaaaatcataataatgaagagctttcagggcagaccattctacatttggtaaaagcaccttactcttgcctccataccaaaatcatcactcatagacttcactactgtcagcttaacctgctctcagaggtggccactgagtagaatagaaagagaaataaatccatgaatgagtaggtctaagtcagcagttctcagcctgtgggtgttgagatccctttaaaggtcaaataactcttccataggggtcacctaagaccatttgtatatcagatatttacattatgattcagaacagtagcaaaattgcagttatgaagtagcaacaaaaaataatctcataactccccaatactttagaacaagctggttatttgggagtaggaactcttaggtatatagagttagttcagatatgcaaatgatgtgctcagataggaaaatatctcaagttgataactggtagacactgaaagatggctcacttagtgttcataagtgaatatacagtccattcttgaaaaccacttttaaatgcacagttgcttctggctttacttaagattggtatgaaatctaataagtaaacttaaccaattccttaccaataactcatttttcttagttattagaaactaagatatctctccatgcctttgaaagagctctccttcatgccatgtgcatgtctctgtcatatgagtctatgatctgtccctcctctttgttaattattctcattctcacaacaggtatgaaacaaaagaagcagccaaactgtgattcagggtaataagttataatcattttctttttctaatttaattatgcctgtccattaaactataacaccaccaacaagaacctgtgctttaagccaggtgggacatggggacctatgcctctatttccagtgctctgaaggtagaggaagaaagatctggagttcaagaccatcctctgctacatagaagtttgaggttatctagggctgcatgagaccctgtcacaaacacaaaagcaatacaaaagaaagtgtaatatatcatatgacatcagatcccttatacttcttcggtatttgtgaccttactgactgtccagtatttaaattagcctgggaaagatagatccaaactagtatttatcaagtataataccgaatagtttattttaacattctaattaataaggaatacaaatgtctgttgccaacatcagctattaatatataaatgaattattagcacatgtataatttatacctatttttcaacaaaagttcagttagatgtaagaaaattatgcaaataagattaggaaaataaaactgagtgtggtggtacatacctttaatcctactactcaggaggcagaagtaggcagacctctgtgaattcaaaaccagtctggtctacacagtgagattctgtataaaaaagatgaagaaaataatttggagatagaaattgatttgtgcatacatttcaaaccttagagtcgcacagttttcaggggaggagctttctgaaggtcataaaaattgaagggataatcacttacaagaatagttgttcatacatttaagtagatatgggttatatgaatatggtttgtctagaagggaaggatgtctacaggaccaggtgtaatgctcataatggtagttggatactttcaacttattatacgaatcatcatctaggtttcctaagttaggtttgatgccataggtccaaggatttacttgaagaaatctccacttcaaacaacagccctaatgttgattcttgtcttttattgggatggtattgctagagatagtctgaacaacagtgaatgtagaaaagtccaagggctgggcagtctcccgttttcccaggtgaatcagtgattttcttgggtttctattttcttctttgggtctgatacagatttgagctggaatgttttctcctcaccacctttacccctcattggataaatctaaaaacaaattatttgattaaaacagaaaacctgttccttaagtagctgattataatattggaatatattgtaaataattcttacttctatttaaataataaacaaacatgatgaaaattacatcagcaataagagcagacatgtattagacatttattgcagggttaaggattttgtttttccttgtcttatttaaatgtaaaaattattgaatgagatagatatcgtggcaatattgattttactaatgaagaaagtaaactactgaaaagctaagcaactttaccaaatgacataggactggtaatgaacagctaagaaaaataagttcctagtctgacttcagacaatgtattaatttcaccatgctataatctgctctgtctcactctggagtgtcacatgaaatttctagggaataaatctatcactaaaaaaattgaggatgctataattatgaatagataagttccctgggctggttttgatgtagtttgaaagagggtgttcccttgctatagtcagtaagtgagcatgagtaagctatagaatgtttgatctgagcagttccaaacctatggaatcatcagatttgctcattcatagcttacttatacagagtaatgcagttccagtatggtgagtagattctgtattttatctcagttatcctcgaatcccctacccacagatactgttcagatagggaggctcagagggaatatgctctacaggcaaaatggggcctcacagatgcatagttaaaacgcctttaatgtttaagacttatttctcaacaagtgtatgaaagtaagtcagaattttttaaatgagtatttagattaaaatcaattgatttaaaagcgggaatgaatttattctcaacacttaaaaaaaaaaaaaaaggagcttttacagaaacaggcacacaaagaggcagctctgatgctggcgcatggggcccgaagttaaggcaacactgggaatgaccaatcatggctacgttcttttgccagtagaaaggattttttggttttttgtttgttgtttttggggttttttttctaccatagagattgggaaaatagcaaaagtagaggattatctctagaatagagtgtgttgctttttatttctcctctggctgtattgggtgatggaaattttaggctacacagctatgactttttaaaattagtatttcccccatgaatagttcttgccttccctgtttgtgaacagcaatttgtacccagtgtatagtgtttccttagctttttccttctttagcattttattttcctagccgattgtagagcataaacagtccttgtgctttaccgctgcttttttttttttttttttttttttttttctgactgatagtcaacttcacaggctaggaagcatagaaacggtttgccttagctgataggatgtttccaaataaaaagtacccaaagctgcaattaaataatgcccaagggtcagagtaatttctctctttataataactgcctttctcaaaatgagaattttcaagtctgaagcatgctgtagaaaatgtgcccacttactcgaatttccttttggatgtaaagtaatgttaaaattggaattattgtggtttgctaaaattgcatgtggagtagtttcatatgctcatgttttggtccccatcttttcccagccttttctttgaatcacactccaaatctgtcggtgaagaatttaagagatgagattcttaacacacatatttaattgcatttctcatatgattctttggggaaaacttggttggaattggttcactgatgcatttttttaaacaacatcaatattcttcatgtcataatgaagatgcaacaaatgaaatagcatgggagagaattaagataacatgtcttcccttcttctttcagatgggaaggttgaagttacaaaagaaggtgtgaagctgtgcaccatgggtccaggaaaagtgtttggggaactggctattctttacaactgtacccggacagcgactgtcaagagtaaggctcatttcccttttctttccacatgccttcagggtcttctttctcttggcctgtgcagtattggattaatgatgattggttgaatctgtgtcatttgttagtctatactcaaatgtttgctcttcgataggtttgacacgtgttcactgatgacagggtgattgttgatagtacatggcatgggataattattgttctcattaaaattcttacggtagaacattttaaaaggtataattttttaattaaaatctacaaggagaaatgcctttcttttcttcctaccagtagagccttgggatgatattctagaacatttccaagcctattttagattatatgagccatatgaatcctacatgttgattctgtgattcagaaaaagtgaggcaagaagtgtcctttgcctcatgcaaacatccctgaataaaatacatcctggattctatgactggatctgagtgtattttcgtcttcagctgctcatcaagttgtacattgtagcagttgttcttttctctgattgagcttattttaaatcgtgcaataaagcagcttgttttcctgattttacatgtatgtgtagatgtgatttccctggaaatgttgggtgttcagcaggagcagctgcagcagttagaggaaaattagtatttttaggaaaatatcttcctgtgtaaagatatcaggttggtataacaaatagagctgaattcaaagccgacagtgggagtccagtgtctttaggcaggtgtgtgtgacacattatcccatagatgatgccaatagaaattatgatgagtagatgttgtttaaaaaaaaaacttcagcaaaaagacaatttatcaataccaattagtattatttgaatgccaatgagtggtttgtgtattttcccccaagaacaatctgtggttggcaacatgccacacaggcactggttgtaaggtactcaagaatgcatggccacctcaagtcccagatacagataacatggctttcagtgagggagtgacctttctcccaaaatgccacagcaacagcctctgaactggggctcattcaggatgggtccttcttggcacctaattccagatcttagagaggggatccttcgattgattaagtactgccatgctttcctttcatgctatcatttatttccaggactcaaaaaatagagagccatggaaacacaggagagtctgtgcaatgttaactccctaataaaaagcctatggtgggaaaagagcagctagggctccattaagcaaaacagatcttacgattatgtttttgcttttgtaagaaacatatttttaaggtaaacaaagggccagaagagcacatttctgttaatatatgtttttcttagaattgtgaataattcaactttgtatactaatactcattgaatctaattggaactacaaatttccaaaggttaatatatggtaatcacaccatacttcatcatatgaactattgaattggaacattggaagaaatattttaaatgactggtttgtttaaatggatttagagctaatatttttttcaagatagggtttctttgtgtagctttggagcctatcctggcactcgaactgtagaccagacttccttcgaactcacaaagatcggcctgtctctgcctactcagcgctgggattaaaggcgtgtgccactaacacctggatgagctaattatttttatgagatgagtactttgcttcataaagatcagtggtcatacgcaggctctataaaatggagtgtgtcttcactacctgatatatactcatgtttgataaatttagttaggcactatgcatctgaattagtaagaacaagctgaatgttggaagcaacgtataatcctgtttccccatcaaaatactccacgccaagggaaatgagtgatggcatcattttttcttgaacataaacagaatcacacaagtgtatgcctatgtgcatatgtgtgcatttcatggtgcccgcttaaggcttggaagttgcatgaagacatgagtcttgagcttatggtgtgacaaggtatctctatatttgcagttataaaggctatggacataagtatggaatattgcttatgaagaactatttcttctaactgttgcataagagctgtaaggtacaaataatggttgtttattgctcaaaactgtttgtcttgtcccctcctatccaaggagattgtacacatgactgtgggccttaagtactagtttttctctgaaagtaaatggacagactttataatttatattatatttatattatattatattaatttatatattatattatattatattatattatatatattatttatattatataatttatattataatttatattatgttatatttataatttatatttaaacactttatgattcatattagaatccaccatggatattatttgtaaacagtgacaacagaataaaacaccaaagactattactcttcccatgtgaaattttaaaatatctttaaacatatttaccttcgtaggtccaatactttcttgggattcagtattgtttgatagctcacttcctaaccatcatcttgcaaatggtgactattgagtatagtcatgtttgagttccagactaaacttgtgcataacagtttacatctgaggagaatgtccttcctatataattagtatgcccatttataccttttcctttcttagttttcaggcctgttctgtcgtcttcttctataattgaaaatattaatggcttctctttcttccttctcaggctgactgaaaattgtctatgctttaaagaattatacagtctcagaatagtgactcaattttaggaggcttgcaattaacatgagttaatcttctttcatgatagtacattttaaagtttttatcagaacatgagtaaattccatcaactcctgatagtgaaggtgatcatagaccttttcatatctgaaatattttaaaattccttagcaaagctctagattggcccaaaatgctacaaaagatgttcctttatggtgatctagctgaaagaagcaatgtggtagcttgaagcaaactcttgtgtatttcccccttccgttagctctttgtgtttttaacttttattgattctctgtagattttacatcatgcattctgatcccacttacctccctggcccctaacatatgccctctacccttgcaacctcctctcaaataagcagaaccaaatttaaaagaaaaagcgaaaacaaaaccaaagaaacagagagagacagagacagaaaaaagaatcttgtcacggaagctgtagtgtggcctgttgagacacacagtttaccctttagtatatttatctttgtttgcaagttgccagagtcattgatctggctcaaggtctctggcttctgctgcaccactgccacctgtaatgagtttgcgctggggctcctcttagataatccttttgctgtcctgtgctgtggtgatcctgctgttttagatctgtagattcataccctttacctactccacagttcatagatttggtggatgttggggtgggccaactcatagccctagttctgggcctgagtcatagctgggatggtcagcccaccagctttcattcattgtcattacccaggctcacccaatgaatgcagcctgcaagtagcagggccagttctcttgttcctaggttcccacactcacaccaccagggccagctctattgttttgcccaggcaaggagcagggccctctctcctgattgctgtagagggcatgccaagataggggataagctctcctgccctcatgccctcaaggctggctcagctgtgaccagacaacaaggtcaacactagtatgctgcccaggtggggttcagggccctgctctcttgtgtgctacagctagtaaggagcagggctagctttgtctctctcatgacctaggggtaagctctttcacctgctttgttttgttttgctttgctttgctttctttttaatcttggaaaaataatcaactggcctttttctaaaagtacataagtgtatgacactaactgttatgatgacactaggaggaaggtctgatattatgagcaagaaacacttttagtactcagaaccatagtgatgtaggattaaaaacatcatagcatggtatagaagatctatattcatggccaactcctgccttccaaggcaacaccattaattctccctcaaggaatgaagacataaaaaaagcataaaattaacattatgttggaaacaaaaatctaacaactttgagtctcaaggaatctttgttagctatgatatgaaattggccccttggatcatacctgtccaattaaaagcagtgcagatgcccagggatgagaaatgaatcagctattacagttggtttctgcaacatactgaataattagtgtctctcatattgtcagggcttctcagatttgtttaaatgtttggccatgtctagaggaagcagttttactgtgcagttttcaaagcctaccacagccagggacctcccattggctgaatacaacttgccttgtcatttcccacaactgctccctagtcactcctggtttcacttttactgcattcactctagagtgttagcaatttacacttaccaagggctcttccctgatttcaatgctcaagattcttcaaaatgacaaaatgacaaaatgacaaaagttgctgggcttctaaaaccagagaggaaaatgtgtttgattcacatggaggacagggcccagtgatgggtaccttatgtgtgccctttcatgacatctctgttgttctatttttctttcatttccaatgaccagttcacagtttcaaaaggttggtcatatgactgaaggcatatggctttttgttccacctttcattcatgggaacaggggcaattttttgctttaaaataccaaagtaaagcaatgttcttcttacactgagtttgcaacacattattcaaatagtcttgctcaaatcctactcaataaaaatcaaagacaaaaagaattctttgtccaaaagagcctcaataccagattaggaagattcaccacagaaagttatctaaggcatgtgcttgtgtgggctgggtgggtattttctgagggtatttgaacaaaatatctgagttactatttctctttagaatatttataacaagtatttaaaaattcctttgtagtgaaacagttcagtgctaacacaacacagcctaagcagacttaaaaaaatcaaattaatgactttgatagcatctgataaaaatatttttctgccttggttagaatgctttcaagttttatccttaagcttttctaagatatcagtaaaagagaagttgactaattaaggtattttagtgtcatggacattttataaataaatttaaaagatttggacttttctgttgttttatttttaacttttaaagtaaatttgagtctctgtagggaaatggcttgtacattcccttgcatttctgtttcaaacattacattattcagcttaaataagaaaaatatgccaagtgtcaaaaaacaaacaaaaaaagatgaatagagagagagaaaaaagaacagattgcatttttctctgataattctatatgccatataatgtgcctgtgcccaatacgtatgccatgcaccacacatatataaaatgcttttattggcagctttttttcattgctactgagaaggaatcatagatgaggttctttaatagttgcagaccttgaaaatatcttaatattttcaagaactaaaccctcatgttctctaaagaatatcattagaggacattgtaaaacaacctatttatgaaagggatacataggtacaaatgaagaagcattgttagcagcagcaattgctgtatacacttattacctgggatttcaatgagtgccagccacctcctgcttccatggtcgccatccataatatgagtaggagaggtgactgtgttaatgagcctctggcctctgagagcaaaccttttataatgcatgttttactttctctgggtctaatgaatgctttctgccaagaatcctgaaaagctgggaagaacacaaaaaataggctgacggggactaaaaagctgaccctagtagacagagattatcctgtgtgttcccagaaattttgtcatccaggataatgaagcaaacagtgcatcctgaattagatacacctgcctagtgagctcagagataacgttcttactaaattatcattatcttatgaattaaactattatactaacatacaatggcatatttcatgagaaataggtttctttgatgaagcagcaattcactaggtactaatgatgccatgtaatagagtaactggtcaaccagataggcaaaagctagcctttgttcttcttctgtagagacagagtccaggtgaattttaagggtagtgatttttctccttaagttttaaaataactgttacaatcagaatccgtttatcatttatatttaattacctccaataagatcgtcatctagtttctatgctgatgaagtatggctgacaatcatatttaacagtgcttctagagagaaagtaactaattcccacttacaggtagataaattactgcccctccttcctttaattgctcagtctctagcatgttgaatgttccttctctttagaaacaagtcaggctttgcctgacaggctatttcttttaaaggatcacagataatttaatagtaagtctgaacaataggcaaggaaggttgcatttttattcttttttcccccagaaatttctttaatcctgaaaggtaatagcttttccatgtagaccacgacataataaaccctacaaaatgtgaggcttggctcagatttggtatttacttactaggagactatttccatacccagtggattgggagcagaaaaataaaaaacccaagacaataacaaaatcagtagtatcatgggcaagggctgcattatctgtaattattttttatgaactccatgtctgggtttgcttacctaataaatgcttaggttatactgataaatgatgaagagattacatttgagggatcaatgcttcaggaggctcagttttggaatgggtggcattgctaccctgctggggtgaggaagcaactgatatatcccccagtttaacagttgtcccaggccacatagctagagagcagttgtgagacaaggactagtttgctgtgctgcattggtttggttttttggttttttgagacagggtttctctgtagctttcagcctgtcctggaacttattctgtagaccagactggccttgaactcacagaaatctgcctgcctcaggctcccaagtgttaggattaaaggcatgcaccaccaatgccactcatttgtgttttaagcacaagtgtgtctgtttgattaggactctactttcacacacacacaaattacacaaaatacaattttaaaattctaaacatcttgtcacatgacccttgttgaaagcattagctaccagaagatgagtgaagtccctcatggagaggatggaagctgaaagcctcagagctgtgtaatgagcccccagaaccagttgcttagctgactttgaaatgcactgaatgtttaatgagataaaccttcatagctcagtgttggaaacactgctaagtggctacatgtttcatttatgaaatctattaattggatttctttaaagttggaattttgaaaatttgaagagcacttcaaaaagaagaatagcaaaggaaattacttttccttgtataacaaagtataaggaaaatctgagttgtgaccagagtatctgcatagttttccttaaattgcctctgatgactggaagtctgtaacctcagcactttatcagtgtgtctgggaagcacactctttattaactggatgtgttttctaagtaccttggtatccatgggagtcgtttgccttatatgaatggtgcgatatttgcatacaacttctacagattctcccctctgtttttaaatgtttttaggttacctgtacataatacaatgtaaattctaagtaaataattgttaaacagtattgtctatggaatagtaagtaagaaaagaaagctgtgtgtatgtgtgttcaatacaaatgctatttattcaagttttttctatctgcagttggttagatctgcagatacagagaactgactgtgatcataatagttgtctgcaatttacaacctatcatcccatgcattatgtaacacagtccccaaaatagcctaatgccagtaggtgagactgtgcctgattatccaggggagaagaaatacatgccacatcatggcctccattagtatatttctctggtaaaatttgttgtaaattttgacagtagtttcttatatgataataatatatatgatattcattttatatatttgccaatatataatgttcatatacagcataatagtatgtaatataataatataatagcacttattataagcatcacccttccttcttaccacatatatggatgcttagtaaacttgataaacctaccatctattcctaaagtataaactcttactttgatgtttgtaaagtgtggtccatgaagtaacaagatcacatcacctaggcacttctggcaaccctaattcatttaatccgaatttctgatgatgggtcagagcagtctttgtataagaagccttccaagtgatgcttgcacatttaaggtccagcaacaagcatccccagaggtccttaaagccttaacctatacataggcataacctcatatgtatcaaattgtccatgttagaatatttaaaatagaacagtaagcactatagtaagtagtgtgactttggcagtccgaacaatgttttcttgtttgctgttgaacagaggtagtcaagagaagttgttctttcctccttagaactgagctgtctgtagagtaccccagcactgtgaaagtgttattttgaacactattaagaagttaaattgaaagaacaggttggggggggaagaaatttaaaaaaacttgtgtggtggggccatgttctcaacaaggatcactgtttgatttattggatttgatggctagactgtgaggagtaaaacaacaaagagaaagtttaatttgattttgttgttactctttcacacagtcattgcagtttgattaagcacaaacacatgcggatggacatttctagaaaaacaattgataacggattgatatgtgggtttctgggttagatcccataaactgaaaccttgtcttctaaatatttgttgggtttttaccaacatagttcatagtgaggtctaggttgccatagatgcactgcatgtgtctttggttctgaccatcacaggttagaaagacattcatgtttcacagtcattgaagaagaagcagtatatcatgtaggattgagattctctgggtctcttagagacctgagacctagactgttgatggatacaggtaagaaagagagcatgctggtttttgtatccatctgtggccattaaagattgggtttcattattattcagaatgatgtgtgactgtagacagcctaagctcacatgtccttgccctagtcactgtatacagcttaaactcaagtgaactttgcccacatgaccttgtttaaccctcagaatgccatcatagtataagttggctacttccctgaataaaattggctattgcatgagaaataaataataaataagtaaataatgaaacctacacgtgatttttttttttttttttttgtttttcgagacagggtttctctgtgtagctttggagcctatcctggcacttgcactggagaccaggctggccttgaactcacagaaatccgcctgcctctgtctgggattaaaggcatgcgccaccaacacccggctctgattgttttttaaagtaattattttattaattctttgagaatttcatgcatgtgtacatttatccttctacatcctccagacccaatcctatcctcttgagtttctatgtgaatgtgacaatagatactaggaagcagagggtgagttaccagaaggcagagagaaaggaaaaaaaataagtaaatgaactgatctggggttgctgaatgcatcctctgaggctgaactttctttattggttgttgtcttataaaagaccactggccccactagtaaacacatattttctgtcccacttctaatagagcaatagtttaaagtaccattgtctccagcccttcagtgggatcagatagcactgttgacatcttccgcacagctttctgatgattttatttccagagtaaagtgctttgaagtgatggtgatggctcagcaggttaagacacatgctgctaagcttcttgacctgagttcaattccccggataaacatagtagaagaatcaagtcctaaaagttttcctctgaccttcacatatgaaaacacacatacacacacacacacacacacacacacagagagagagagagagagagagagagagagagagagagagagggagagagagagagaggttaccccaaaatggtcctattaaacccttgacctgacttccttctcactcatgcttcaggattaagtacttctctggaactttggagtttaggtaggtaagattattgaaaaccgcagtcctattgaatccaaagtgactgagtgtgtgagtaacagtgaccctcatagccttcctgctgtgtaggctcttacctttgaaacagtaaacacctgccttaaggctttgtcaaaggttaaatgaaagcctgtgatggactgggtgctgaagctcaggtacgatacaccccagagagcctggttgtggttattgctatcattaccactggtgctgtgcaggcaggaaagagatttgaagtgacttggggccatcgtttgcagaatctgaaaggtactaatgacgaacatagggcgcagttgaaaagcccaagatagacaagtgcaaaaaagggaaggcactgtgatgctgtctgggttctctgaaaggatcacagacccagagctaaccttccttttgtaagtttttatctggagagattgttctaaagtgtactatgaatacaggaaataccaatatcagagctgcattacaggtaaagacataggattggaagcagcaggtagattacacagcctgcatagtcccctgcttgcagattagacattggtctgcgaagaggtgagggccactaatatctgtcgggtagtgctatagtcattactttttgcctcaagtgtacaatttattttacaccaaaacagctgaaactacagacattttcatgtattgacttttccctgatcttacttgtattaatcaaacaggactttaaaatgtatcacataattttctgatcacacaagtagtgtttttataaagtatgtacattttaactttaaaaatcatttattccctaccactgaaaacaaaaccctaatgtttggactttatatactttctctggaacatatcagaaggcaaggtcatccttctctgttggttaatggcctggctaattctgatctttggtctcttttgttcatggtggtatgcgtttctttctattcttcttaaggaattactttcaatctagatagctggattttgttttgaatttctctttaaacttcctaattatttggaaatattaattccttgccttctagcttgtttatctgccatttgcactattcacaaatggctcctgcattgttctgtgtgtatataatctcctaactccaggtgacctgatggcttgaattggaagattagtatttggtattcatgtttcatgaggagagtgaattacatgctgttatgaacaacctttctgaacagagctcaagagagcagaatagcaagtagtggtgagagaaccaatgccatctgaagatgtgtttgccaatctctttctcatggttgacaggataaatcttcagagccattttaacattctccacattttgttatcttagcattcagccattttgttttaggacttttatgtttggctaagttgcatcaccagtggcttaaatttatggaataattatattgaatgattttaattcagcagaactgtttcttaaaaaaaactaagtgttggcaagcttgagtcatttacaaccatgtccctttttctttgaaacctcagcatactagctaagcagccattagttttatcttcagagctctcacagcatcttcaagagcaaatgtgctctatatttcatatgaactgaccctcaactgttgttaatatctgtgttaatccatagatgctacccacaaagatgaataatacccacagtgtaggaagtcaattttttggtgaaaactgtcttttccaatggagttttagctaaatcaagcatttcatcatcattcagacactcctcatgctccttttaccagtaagaatcatggttccacttgagctttttaaatgaacaggtatacttgacttatagcttggatttgcagtcaaacattgattcttagtatgttctacaaagcctttcagatcttctagcactttgttggaaagtaagttgatagtctaagaataattctgtgggacctaaaagaaaagtgacataggttactatgagacccatgaaaccagtggctagtgtctttggaatttaagagtggctaggaatgtggactttggtctaatgtcatttagaagcccatcaactaccttttacttttcaaaatgtatcatttagagcagtgatattactgaaagaaaggtattgatgggagttattcataatataggagattttataaacatttttaggtttaaaacttccccattaactgtggctgtagcaatggagcttatagtccagtcaagagtctagaataataagttaaagacaagtatcagaaggcacattatgaatataaataaaaattaattttattgaaggaaataatttttaaatcttaaaaatttgatttgatcatcttaaaggcctctatttttgaaaaacatacctaagcatatgaacagaagaggaaagcacataaaccctatcacaataagaaaaggacatataaagtctgatatatagggcatgtaagttaagctcaaactcaatacaaatgctctacctgtgaagaaagtcaacttcagtaaaagttccatagaaagatacaaaaaagaaaacttgtgatgtttgtagatttttaactctattttactattcagattatcaacagaatacattattttaaatctgggttgatttgaaaatcaaatcttattagctatgtatttatttgaaatattaaacctcagataattattgctgttattctatcagtacttatttttattccttatgaggaaaacacagaagcttcataactcacctaaggtattgataaaagttattgataatatagggaaatatgtaacatgctgaaggcatggcttcttaacatttatggtcatgacagaccacatatagaatgctgtattggttattttttctgtgataaaacaatacaagccaaaataacttaaatgggcttattttggtttgtgcttccagagaaatagagttcagccatgcaagaaagccatgtcatggaatcaaggtcaagaagctgactgagcttttcattcacacgcagaaagcagaaagagaaaccaggaagtaggacaaagttagaaaccctcaaaacccaatgactatttcttccagaaaggctccacctcctagaggtcctttaccttcccaagcagtgccaccaactgagtaccaaattctcaaatacatgagcttgtgggagttatttctcattcacatcacaaacaatgccatataccacagcctttgtctgtgatagtctgtaccatttagaagcatgtcagaacattctgtcatgttttggaacaatggaatcacctgatgcattcctcaaatgtgtcctatcttcgaataatatgtgtatataatgttttaaaagcacaattattctttttgttttatcttttacattttaattaaaatataactgcatcactatctgccctccctttactgcttccaacccctccccttcctccttcagcttctatgccccccactcccagattggtaacctctttctccccgattactattgtttcaaatatatgtttgtgtatgcagaaatatataaatacaaacagcttaaatctcgcatattcttagtattttctcttccttgaagatttgatatacttcattaagttatttcactttgaaatacttttgagggacattagcagacgctgaaaagcttggttgaatcacggaaggatataaagaaccacagcttttacaggaacctttcttttaaacatagctaataaatcatggaaaaaagtctgagtccctctatagtaaccctgttgcaaaacttgaaggagaaattagctctctctattatgattgttcttttcatgcactagtgtagaattcttggaaagaacaagaatggttcttcaccatccccttcaagctcctcctacactcagcaccttccctacaaagtctacctcctcacctggcagatggcagcattgtggaaggatgtctagactctaaggtgccaaaatgaatagtgcttgatattcgttgactgcagcttggccaggcatttaatggcctggctcttttgttgcataatagtggccacagccttattttcctcatcatcttgttcatgaatgccaagttaatctcatttccttctaatgtgaaggacacatttgtcaatgttgttctttttgactcccataggcaatgcagcatgggagagggttttagattggaacttgggttctctgggttgaacagtatttcaacatttagcaaattgtctgacctcactttaactccactgatctcattagggaagggaagacaataaggtgaattccatgggttacactgagacttaaacaaggttacatatgtcaagactgaaatgttgtgtgttccaaataagagtacaatgtgatgatggttctgggggcatccaggtctaccataactgtcttatttatcatctaacttcagaaacagagatttctagaaatccctgagctttccactttggtgtctttatgtgagatattttttccaattaatttgcttgccatgtaaagctatctttccccataacccctgcctactgaaacaaatgcctattttgaatgcacttctaaactttcttcctttctaatccttttatggtttaacactgtttcagtcaaatttatatcagacatctatatctatcagtcctcatgtgagaactattgatatatggtgccctggtagatttatcacaaagagttaaaaagatgctctacaattttgtaaccctcaaattctgtgcctcagagggctttcacacatgactgtgaggtataccttgtgcggagtatcatagtcagcttcttccttacttgcagagtgactgtcgtttttccattattaaattcccaagcttctatcagatactactgggtgctttaaagatattaataattagaactgattagaaaagagtcatgtgcactaataattttaagtaagtgagtacaaaaaccaaaagtgcagggtcttagggcaatgtaacctaatgatactctattctttttaagaatatgaagccagatgtagtggctctccgttctgattccagtactcaagaatctgaagcaggaaggttcctacctatttgaggccagcttgggctacattgtgagactatctcaattaaaaacaacaatgtgccaacaacaaaatagggacagctttacttagacaaacagaaaatcttgcctttcaatcaaagtttatactaaaatgacttccttgatactaaggctatctttaagtcacactactaaatgttagttgccttttatttttatttttaataaagaacatataatattctgattattctcttaacattattggttggcatagttgcatttaaacatgccctttggagttcaaaatagtgcaaagactggagttattcacagaattagtggccatcaggacccctgccttggaagagtcttgtttggaataacaaatctctgcctgaagatggttagacaggattcatttgcagtaagaggctgtgtaccagctcttggaagtaattagattgcttcattgctagtttcacaagcctccctcagtgtatggattctcaaataaacagtaagaaaattatattacagagactgacagcccacatacaaatcctctagtataataaaaactgattaaagatgttcaaatagggcaagattccttagcatctacctacaaggctatcctacatttttttattgttgttaaataaacatcagaacattttcaattacactgtttgctttggcattatgttttttacatcaatcaggctctcaaagagtatctcggaaacaaagaggcattgggatgtattttcttttccttttgggactaacgtgaactattataagttcacactttcttatgcctaaaagagtagagcagacactattagtgtcaggttacaccccaaatagctataatgcagctacttgctgacagctacaactcatgccccttagcagctattcccacttgttattaatacactgcaggacaccggcttttcccagcaaggctccttttggcaacagttctcatttttacagagaatgtttattcatctctccattttgtgaacatgttagtcgcccttgtttgttggtctaatgctccagttgcttgaaccatcccctcgggtgcctgccccccttggtttatgattttttggtttaattctctaatgcaccatttttaaaaagcacgtgacttgtgaaaagaatatctgaagtctaccctcttactgaactgtgtgtgaatgattcagttttgccagtgatgctctctgatcagtctccaggacattcacatcttgttttccaagggagtttttcacccgttgatgaatactgcatccctaagcctggaaaccaccattgtattttccatttttatgagtttgagtcatttagagtcatcctatcagtagttttgtcagtgaacaggatggagcgtttggaagttataggtgggtttacagcatgtatggtggtgatagggtcacactgtggaaatacaatgctcagcatgcacagcattttatgaaattgccatcattaaggtggcttggaagtccatgccgtgctctgctagagacttggtgtcatacatttccattctttatggcttttgatgatgacatgtgaaaattccttcatggctttttaataatctcaaaactgaaattcagtctggaggaaaagaaagatctctctaatgctaggctcttttctttaagactacttaaaccttagcatcccaaagtgatgctgactaaggaaatactgagcttagcatagtttgatatcatcaataatttgcagcacattaatttaaaataactaccttttaaatcatttacccatctattcagcagtcaccagattggtaccctgtagttacttttctttgtgtgttattgtttttcagggcccactctctctttaagttctgattaatattcagatcactgccaagcctttcactctttccacatttgttcaaggacatcattagctcctgagagggtgttagagagcatttgctggatgcaaaagcacatgcatcagtaacttgatttagaaggttggaagggcagaagcaaaatttagaattgaaggttgatgaactttaggggcagggagtgtaactcggtgggagaaagcttgcctgcatggcattcacaatgctctagatttgatccccggcaccaaaaagcaaaggttgattcattttataaatactctcaaatcactaatacaagctcatgacatttttttaatgttttacagtgttaaatacttgaatttctaaacttaaaagttctacatcctaaaactttgaaaataagaatatatttttagttaatttttagtacatctttttcactttaaaacaatcttttctcattttacataccaatctcagttaccactccctcccctcctcctgctctccccaccttccccctacccaaaccccatccactcctcatagctcagcctttaaaggccttgatcacaaccaaaaatataagaatacattttttttaaatacatactttaatctgaagtcattctgtcacaagaaagcatagactttcagtttatatattttgggaagaggatagtttaggtattttctatttattaacttatatgcatatttttaaattgaactataatatgcagacataaacttcagagttaacaaaataaattcaattttaggaaatgattggctggaatcagagagacaggatatataaaggacttagtgatctgtagtagttgatatttttgtggctctcatgatcacctcactcctgttgttcacatcgttgcacaatcattccagcttccttgtatcctgcttctcagaaacagaatatggggaaaatgaagaaaggatcagattactgaaaatgcctcagataattaagagaatgttaaaaaaggacacctcaacaatggcaaaagtttaggctaaaactggagacagtagattctgtaatttgttagcatgtaaaagcaactgcaaatgaattagaaatcaccctgcacttttatcatgtatatttaatcaaaaagtaatttgagttaattttagatgcatgctcctaacatttgataatggactgaaacacctcaatattcctaacataaaaatatagtagaaattgacaactttctttgtaattcaactacaatattattattattattattattattattattattattcaatgtttgttttgaactagttttgataccactttgctataagattaaagtaagactacttcaatcaatggagtgagtgagaaagtgttcaccatctaatttgaattctccataacatatataatagatgcaaaatcagttatgattaacttactgctctatggaacagcctagcctaaatggagaaaatgctgacagtagtgtgagtttctaagaattacttctcatagctatgatcctttttcaatataaggaggttaagcttttcatgtaacatttgaacatagcaatcccctagatgtaatttggtcatcacagaattcaaagtggactaaaaagcttaattcttaacaatgccctttaagagctttttggtacatgcaaaatcaatgttacagtggaaagacattttaataaaaagttcttagcattggaagtgtgaaaaactcattacattccaggaattagattttctttctgaatataattggagtggaagtattttatttggcttttgacagcactgtaaaccagatatgtagtagaggttgacatctgtatttacagctaggatgctgcttctcagaccttcactttgggatgaactataatcaggtcttgatgtgtttaacaaggatcctaatctttggatcttctctccagtaccatgcagaatatgattagatgaaagctatgtgacattaaaatttaaatgcacacacatattatatcagtaaactagaaaagaaaaaaatttgcttggaagccaaacaaaggctgctctgtagcttagactgactccatgtgttcacattttctctgcttattccagggcttctggctcattcttccatgtctctttttaactcttgactaggtcatgagtgaaatgcaaactcttcactgtcttacttctgtgtgggccatttctttcagaatattctcattaactactaaaagaaagtggggtgaaaaataatacctgccataagcaagatgtcaaagtactagattgggaattacaaaattcattgaaaaaaaaagctgaatgccttcctagcatgtgttgggtattttggtaggcaccaagtatagaaagataataaatgaactaatagaccctaccacagagcataaatcacgtatcaatgcctgcaggatgtgacaaaggcacactagaaaagaaggcaacatccttccacaggctgaggtgacaggcatgcccagtataaggactgccctgagtagaaacgtggaagcaagaaagaacttgatgagttttgagttttgaaggacaccattctgaacaatgacacactggttttcatagtatatgccctagctagcagcatcagtattccttgaaatttattagacatgcaaattctagaacacacacacacacacacacacacacacacacacacacacacacacacacacaagcactgggttcagaaattacaatcaaagcagccttctgggtacttctggactctcttaacttagaaagcatgtgttcttatatgttgagcctatggaatagcttcttttatcttttaacagatctttagcaggtatggtagaatattattttaaggtgtatgacttttgttaatgctgcatttgtttaactctgtgaagcagtattactgtgcctatctaaaacacctggtggtcccaataaagagctaaaaggccaatagcaaggcaggagcaaggatgggcagggctggcaggcagagagtataaataggagaaatgaggaagaagggagcagcaagaggaggagagacgaacgtcaggggcagacacccagacagccacagagtaagaaggaaagtaagataaacagaaataagataaaagcccagagggaaaatgtacaagggttaatttaagttaagaaaaattggcaagaaccaagccaagctaaggccagacactcacaactaaaaataagcctccatgtgtaatttacttgggagctgggtggcgggtcccccaaaaggccaaaaagcaaaaggggcaaaaccaaatcactaaataaacaggaatggggtatttgttttgtttatttaccaacaggtctatctgcagcagtttgagactaaattatcatgcatgtaataaaggttcaagaatggggtggtggtcagaaatgcagttggatgaggtttactaggatcttgcaattcaaggcaaaaggaccaggatgaactgaagaacgtactgaatagagagcagtatggctggtcagcattatgcctcttacccacttctggctctgctcttagggttaattgctggagtcttttcctcaaagcataaccagagtggaagttgtcctctctaactagttatcagtttcatttctggacaagataaagccatccactaggtttctgtctccagtatccagacagattgcatcagcatattttccctggccttaagccagcattcccattagaatttctgattcatttcaacagaacaacaattacagcagggaggattgtccttgtggtgaaaataattttattatttctttgactctaaaaacaaacaggaaattgtttagcaacccttccaatggctttacaatttgtgtccttgttcagaagctgtttggttcactgcctttactgaaatgcctttggcttatattataacagcatactctgagtgtgagctatctggtgcccagcttacacataaacacaaaatgaagatggtgatgctgaatcacggtgccccactatttatccagcctttcctgtcaggcactgtgcccagtattttacacgaattatcatgttatcttgacagccaatgtatgagacatactcatttttacctttttattccaatgatgaattgaggactccttggtctaactagactaataggtaactgagactggtccagtttcagtacagtctgacaaaaagttagggggaaagaatttccaggttgggttgtacacgtgtggagagatgcaaatgctaatccagtccaggttgaaagagtaagcacactatgtgcatagacagagacaaatcttctcatatcatctgagtcagaaaacctccttctagggcttctaggaacattgcttaatcaatggatataatcaaatgcaacaaaggaaaatgtgtatggatgttattgtgtgaaaaactgtgggatacaggggttggagagatgatgcaattggcaaaacacttgccacatgaagagggaaacctaagttcagatccccagcactcacttaaaaagaccccgcacagcagtttgtgtctctaattccagaacaagggagcaagagaatgctggatttattaataggcagtctgtctgaatagatagtctttgggttcagagagagaccctgtctcaaaatataagatggagaatcaaggaggaatctcattgtctacatgtggcctctacatgcaccctgcatccacatacaaaacaatgtgaagcacatttgtttttgtctgtatataattttccttttaagttttcatttcatttactgtgtggagggtatgcatgtgtgtgtgcatgcatgtgtgtgcatacacatgtgtgtgtgcacgtgtatgcacataagtataagcacacttgtggacgtcagagaataacttttgagagctggttctctccttctacagtggtagggtctggggctcaaactcaggtcatcaggctggcagggcaattgctttacctactgagccaatcaacagcctgtactttcttatatttaataaaaattactttttgataagaaataattgtatttgcagctcaaaaagtttctaagtttgtctccataaaaaaataaaataaaaatatattatatttaataagtttgatttgtagttaataattttatgtcttcatgaggtacagagttgtgtcagcacatttatttatgatggatagatatttgattgatagatagatgatagataaatggatagatgatagatagatgaaggattgagtcaaatacatagattatctgtcatcttaaaacattggtcatttctttatgataatattccagaccttctaatttgcaatagatgatacagcattttaagctatagccccacaacagtagtcattgtattcagatctggctgtgaatttttaccttgtaaatgatttctccccaacccctgtcccctctctttgctgactgacctcttagccactgtttctcattatttaggtaaggtcagcttttacaaaatcaagtagggactgaaatcatgtgttatttgtcttcctgtgtctgtcatgatttttctcaaccccagtttgcttcaatgtttatattgcttaatatgtcttttgtaatagttttccttcacacttttcaactatccattgtaccataaattagttatttactactcctactgtatatctcaactagcttgtttcgcttaactttgaaaaaaaaaattgtgccaatgttcaggtcactgtttggataggcagtgaagaggcagtcacaagacaaaacagacctgcaggggtgccttcttttccaaactttggatttcttaaaatgactatgggtaactaaggagtgctgagagtggaggtcttccccagggagcacatggattggtatccaattacaatgcttaccctgaaaacgtgcacacacacaagcaacagtgtacagactgaaaaggttatattttgaaatatatatgtgtatacatgtatgcatgtaacacaataaaaaaggtcatgaatttgaatttaagcaaagaggggtatataagagggtttgaagggaggaaagtaaaagggaaaatagtgggattatattataatctcaaatattaaatcaataaataataataaaagcaaaagtaatagcttttatgtttatatgacattttccacatctcagatgaggcatactttgtatcttaactcacattctgtactataacttaaaaaacataaattcttattacttccattttgaagcaaatggaaatgcagaggtatcctaagacttacccaagactgtagactcatcataagtgttttgaattggtttctgagttcacaaatcatctctgaaacacatattcttgcccatcgtcagacactacctttcaaccacagtcaactctgggagaaggtgtttaaaagatcctcagaaaatataccctgatttataaggcatcaggtgactgactcttggtgattaactaagtaaggtcccttgcttttcatatggcattgctcatccctatcagctcacaggatctaggaaaactcagctttaaaggtaagtcaaagagggaatggagaagtggaatactggttaagagcatagaggacccagtttctattcccattacccacatggccacttaaaatagtctgtcaatcctgtacaacctgataccctctgcttgcctctaagggaaccaaacacacacatggcacacagacatgtatgcaggcagaacacctgcactaataaaataatgaaatattttaaaaggatgagtcaaaggtatattcattgactcttccttattattaggtgaggttgtttttatattacacataggtgtcagattaggagaataggaaagtatataaattctgtgataagatgatgaactttgataactatataagcactgctatttactgccaggtgttctagaggtgttttcctctcctttgctgcttttcatggcaagtagcacagttagaaaatatgcaaatctaaatttgagtgaatgaatactattaaaatgatcaaattgccaagtactttaaaaaaatcatgccaaaactcaccacaaagagcaccaagcctattgaacataaaggggaggtgggaacacagaaatccagggacttcccttgtccaagaaagagcacagataaccattagaatcactactctacttgctttagtatcagtaactgcctctaagttactgaaaggaaggcagtataactaatgctatgatgtcacattgctttccttaaaaaatcagcaatatatttcatatttttaaatgagtaggtaatcagcagggatcaggtatgtcacaaccgtatgaactgcaaaatgtgaaaatgttgtccaaatcatactctcatgaacccacagggccagcctgtggctaagcatttgaaactattatattttgctagatggccttttaatacattgccttaatactatttatctatttttcccttccttctctaaatgcccttccgtaatctagagtaaaaacaatgtttttcctgagaaaagaaccacgtttttttcttttttattattctggttgctcagaataaccatatactttaggacagtgagcaaagtatctcataaaattttacttagattccatagttaacaaaattatttctaagtcagttcttattttgtccatgtttgagtattagccagaccacatctttgtgcatcataaaccagcaattatgcatttcttggcagttagtattctgtagaaaggtacattccttcactaatgaatccaagtctgaaataagagagtaggaaatagtcattttggtactaatgttaaaagacataaaagattcaggtgctcttttaaattttattgctgtggagtaatccttttgtacactttgtaaattatgctgtgattggtttaaaaaagaagttgactggccaatagctagacagggaaaggttagacaggaaaaccaaataagaatattggttaaaaggtcagggttagaggagtcactggggagacatggagaagaaacagggtgcaagataaaagagaggtaatgccaaatggcagaatgtagattaatagaaatgagtttatttaagttgtaagagctagttagcaaaagcctgtgctatcagctgagcatttgtaattaatattaagcctctgtgtgtttgggagtgactgctgggacacagagaaactccacctaaatcatttaggcttagacatttaattttaattttgcaaatataatcaataaaaataatttgttacatcaaaaaatgtttactttcctgaataaaatacctaatgaatacctaaattgccaggtattatgcctcatacctgtaactcaagcatccaaaaagttcctgagtcatgcagagtataagtttgaggctagcctgcactacattctgtctcgaaagaaagaaagaaagaaagaaagaaagaaagaaagaaagaaagaaagaaaggaaggaaggaaggaaggaaggaaggaaggaagggagtagggagggaaggaaggagggagggaggaagaagaaagagagatggaaagtgacctacataatgactttcacgataattgtcattttacctttctgtgccagtttcatgtggtcaatttgatcaaatccaaagataaattaactgagcacaccaatttagtgctgagttttataaattgaggtttggcttaatacattttcaagtaggtgggctgtactttggacttttcaagggcttttgtgaggaggctgttttttttctgttttgttttggactttttatgatttgttttcctttctctatctctctgtctctctgtgtgcctctgtctctgtctctctctgtctctctctctctgtctctctctctgtctctctctctgtctctctctctgtctctctctctctctctctctgtctctctctctctctctctctctctctctctctctctctctctctgtgtgtgttgttgttgttgttgttgttgttgttgtcattctctttacccaggccaacctcaaacttaccatcctcctgctttagcctcttgattttaggcatgcattaccataattgagttagagttatgatttttgaatatgttaagtgtgtactcttggggcagctagtaagcccccgtacaacaatttgtttatttgttggccatattaagcacagtggtgtaatattcaagtccctcttgagattagtaatgccagcttagataagcataactctgctgcaatttggcataaggtaataaaagtatctgttctactgtaggatagaatttcttttgggggggtgatttttgagacagggtttctctgtgtagctttggagcctatcctggcactcactcacagagatctgtctgcctctgcctcctgagtgctgagattaaaggcgtgtgccaccaacgcctggctcatttttattttctaggtattttctttgcacaattagaggacaatacctaacctatttaggaactatatcagagaaaattggagcatatgtatagtagtttccagatagcatagttttgagttagactctcacccatgtcagcatggtgactggttctacacaggtcacaaggtctttaatcattttaaaaaaatctgaacatctcccataggctctattaatggagatgtgcttagagccagctgtctcttgataaaaccaaggactagaaagcatttggtgtacttggctctaaagagtgtgacttctttaccacattcttcactgactcccgtcaaccgaccacaaacaagtcaatgttcagcttataaggaaggccatcttcatcaaagtgatcgattttctcagcaccgccctgttctatgacagtcatgactggtaataatgatcataattatatatcatattttgagagttctgtgttgtctagattatattttcttctttttctctactttataattcactttagatagaatgtactctaaatgaacctattttgtcaaaatgacccattttattgagtgagcagttggatgcagcatctgtgttttgaggccacaactagctggttattataagtcaactcacaataaagatcatatgaattttcttaaattttcaactaattcttacatctttactgacctccaaagagtattttcctctatagaattttttcttccatgaaaatccttatgtgcttattaccagtcaaatgagttgtccattgaatcacttaataaatactaattaagcaattactgtgtttctgtcactgcatggagtgctgaggtcacaacagagaaataaaccgcccttctccagcacttagataagtgggtgaaataaggaatgatggaaacatcagaataatataaaattatagcttctgtgtgagacacaattggagaagagcaagatggctgattatatcctgagggacttcctgaagaaataagggtggcaaaggtgagtgtcaggcagggatgtgtctggcaggggccgggtcatatttatggtagagaggagcaaatgggcacatgatgttcaattagaagagacaccagatagggaccttgtgaattctctgttctctaatcctctccattctgtgcataaatactgatgtagtatttggaatgaaaccaacatgcaatgagacctgcagtttaggggaataattgaatcatctctgatttagctgcttagagcttcctgtgagctttcagtagcatttagaaaacattgtaggacaaaattccagttaacctaggcatcttcacagctggctgcctttgaaacaggagtccttgttaagtctcctgtggaactatggaaacagaatctcttcctgtggaagaactagatacctgctcttcccatcttttgagtgtagttctgagaagaatgggtaaaccattttcagaaactcaagaacaattctctgtaaagacggaagtttctgatccttgagactgttctcctttgcctaatgggttttgaagggaaccctgaggtgcaaacattgtgctgagaaggaaggatatgtcaacaacttggagaaggtttctgtaagtcattaaatatgagctcaattccagttgtttttcaactttaatcatgtcagagtttgaggagtttgagaatattagagtttgtatagttttacttttagaactagttatgagaaaacaatgtatgaaaaaattgaattccaagtagaataatctagctatacttatgtttattgacagaaatattttttttcttctgggagtttcatagactgacacaattttttcagtggctgactcttccactttgaatcagtaaatgatactaaaatctctatgtggtagctaatatatctcttaatttgctacatttaatcatcccatgatgtatatatacttcaaaatatcccattgggtatagcaagtatatacacaaaaataaatagatataggaatgatgtgtttgtacacctgattaaataatatacatgatgtgtgggtgaagtgaaagctactagtttccttgtccctgaaagtttttttgctgaattattaattctacccactatagactcaaaccaaacacaaatgcactgctgttaagtcaggtcctggtccatgctgtctcgcctgtgtcacagagggaagtttttcttacataatactctttctccagatttagtcctcttcttctttcactgctgtgttgctctttaagtctgttttccacacagagaaaaaaatcaacatatatacaaatagaaaaatgtcatctgccccaaagggctagacctgacttgtctgagaaaattaaccacaactcggttctatcaagctctgactacacgccagaaagtcgaattttaatatcaaaacaagtttatctgattttttcagagcaggaaactttcttatatgaaacacaaaatagattcaatttaagaaaactctcagcggtttttttgggaataactgtgagttcacggtaaaggggtcagagctgtggtctaggatatctgacctctttcacatagagggctcccagtagcttgtgactggctttgaaatagactgctaaatgtagtggggacttgactcctccgaggacctgtcagaatcaactagaaggcacactcaaaaaacttgcattattctacagaaaacataagagaaaataagcagagaaaagatattgatgagaggtatttgcaaaagggaaaatactttgtgtattgaaattgagtttcaaattatcttgtggaattaccctttaaaaggaaattgcacagcatatagtttcacctaattatctcacttaagcataggggccaaattcatttgtccatagtatctactgttcattttacattgaactgacctcatttggaatgtcccctgattcttttcaggacatgtcattttaggcacactgaagagcttgccttcctcctaattgcattgcttcttaaaactgtgttcatatttctttggtagcttcagccagaatttgcagttattgtttggatttttacttccagcttttttccacttctgtgttctattcagacactcagtatatccaatgtttgtttttctttgggagtcacagttttccctctcaaaaaaaaaaaaaaaaaaacaacaacaacaacaacaacaacaaaaaaaacagagaagtcaaaagaaggagtgtcagagcccctcaagctggagttacaggtggttttgagccctactatgggttctggaacccaaaccattgtcttcaccactgatccatctctccagccccagtagtcatagtttttgtttttttgcttaatgtcagaaattatacacactattaatgaacaggatttggatgaaggacagtgtaaccacatgtttctcccagtaatgtttctgcttgttgatggccactcaatgtaacttcttataaataatgccaaacaccaagtttatgctgctgatccatcaagaaactagatgggtaaacatgtttgtcaccaagcctgatgacccaagcttgatccctgggatccacatggcagaaagagagaatgcactcctgcaagttgttctctgaccacatacacgcacacatgcatgaacacacacacacacacacacacacacatacacgcacacaaacatacacacagagagagagagagagagagagagagagagagagagaaagagatggagagatgcatagcccccatacacacaaaaaataaaataaataatgtaataaaaatatctaagaaatccctacaacgtcctctgtcatgtatggcttttgtacttgtgaatcactttaaatcaaggtgtgtagaaaaccttatgctatgcaataactaatgtttggagatcaaagccttaggttctgaaataagaaaatggagtctcctaacagacaaccttgctcagaaatttcagggattactcatccttctaccagagctgacagtgccacagcagacatggctacactgtgagaaatgcacacttcttgcctgggaatctctgcatttaaccattgttttaccttctaaagatccccaccctatgttaatgaagcatttcttccacagtctctcattccttgtgattctgatgaaactgctgttcaagtgtttcccaccctcagtcaatagctaggatagtacccatatactagactttttagggccttaaacgtgagacacaaacataagaagcaaatggaactgcattttctctaaaacgatcaccgttagtttatggttagctctcagacctgccctgattcctatccattcatgacagtaatttagtgttctcctgtttctgaatcatgcaatacccttccagcacatccattttatttgtacttatgttaaaattttggtcattttttttcttaaaaattcctgttgctggtaatcacaagattctgacacagtcagaaaccccagagagtagaattattttctcatctttcaaatagtctgcctgttttattgagagaaggaagccatcggatacacactcttggtatctctaaacctgacaatctcagcaggggcctggattgagcaaagatcacagagaaattcagggaggctaagacttctgtggatgccttttggaaacatctgggtatgagtcactgcctcctaggtggattcctatggaagcctgctgctgccacgggcatgggccttggctggttggaacccagagtcgatacctgagatctctccatctgtgcttccctgtgagtctctgacttgtgtgttcctgtcattaccagccatgtttgtgcaggctcttgtccatttcccaagttagtggaatgttcttaacagtttacatagtattattttcttcttttttgttggttgattgttgttttttgttttgttttgttttgtttttgatttttcgagacaagatttctctgtgttgctttgcagaccaggctgacctggaaatcacagcgacctgctgggattaaaggcatgcaccaccacccctctgcctattattttcttaacaatggggctttgtattgcctaagaaccaacctgctgttgcccctctgagaaaactccctttctttgccctgggtggcaaaaacaaattctccatataaatgtaaatttatactgttttagctcatttcctttgtaagtttttgctctttttcagcatgtgtacaaagctgtttttcatggtcaagtatgtgcagattttctttccacctatagcaaaaatgctcaataggaaggtgcctgtgggtaggtttcatacctcattgtagttagtctattgggtttcatctagcatttgatgtgacatacattttcataagaaaagtcatagactctattgctttctcagtgttttgtgattccttaagcactaagaacataaataaacaaaacatggcttacaagcttgatttctgtcctaggctgtgcatcattcattatccaagtctgtgctgggacacaatttccactcagctctgaggtcacccatattcactagaatagaattgagtaaagattctctcaaggtggttttttgactctctgggggcctgccaccagctcccaaataaatacatagagacttattctgatatatgaatacctggccttagcttggcttgtttctaggcagcttttctaatttaatccagtttagttttaactaccttttgccttggggcttgttatctttctttattctatatatcattctttccttcttacttcatggctagctgtgtggctggaccctggtgtcctcctctccttcttttctcactcctccctctcttccctagatttatcctcctattaattctctctgcctgtcagccatgcctatcctttctcctgcctagctattagccattcagctctttattagaccaatcatgtgttttaggcaggcaaagtaatacagctttacagagttaaacaaatgctacatgaaagaatgcaacacatctttgcatcattaaacaaataacccacagcaaaaaatgaatataacacatcttaaactaatattccacaaaaattctccaagttatctcatgccaggtctgttatgctgacaactcaaatctgtaggcatttgcagtaacctggtcccatcagaccagtcctaacccactgttacttgagcattttatggggcatacttggaatcttgtttcattttgccatgtgccttctctgggtaccacagaattcaaggcaatataaaacaagatgtatctgcatgaatcttgggctgtttggttatcaaatgatgtctctgtttcacataccttcattctttggcaacagtttgctaggatttagaaaatgcacagcaattgtagttggaagaactgacatttatttttcaactttaccaactgtgctgttgttttgaatgaatcatgtacattctgagatttaagtccttagtctgtaaagtgggagcaataatactatccaaacaccattgctacactgattatcaaatggaatcaaagggcagcaaatattagaccctgcaatttgaagtgattagtcaaaatgaaatattagtgtcaaattatgaatctatatccttcttgtgaagactcagcttcagtgctaggtctgctgattatcagcccctaatgcttggctcacaaatcaacaataggattatttcaatggatcttcttttcaaagatgaatgcatttgaaatcgaatagataagaggacattcgcctttgagagagcaatagatttcagtattaagagacagacacatttaaggtgcacttaacctgttttccatgcatgatttctaaagtccttacagtctaaaaaaacactaagtggatcttcctggtccttctccaaagatgcaagagcagtgagactcttggatacctatgtgtatttgtattcagtccttttcctgagtattctatctatcctcattgagccatcatgttctccaatgtttgtctcccagaactatcttcttactccttctcctcctctcttttccctttagatgttaaacaaaatgaaaattcctaacacttgctctgcaatccactgaatattttgtgaaagttcagtgagacaatttaggtgatgatattaaaaccaccattcactttttgaaactttttgtaggagtggagtatggtcacacagaacatgctcaagtggccttcacttagcactatcctattatttttgtagccttgggagctttggagaatcccattagctctttgagttggaaatacttaatctgtaatagaacagtgactaggacctgccctgatttgtggctagagtttagcacaacagaatttggacttctgaatgtcctgaagacaaagcccatggatttggtttattttctgagaactcagtctgtcctccaagacacgaacctcttttctttcacatctgggtaaaaatatgaaagttggaatgtttgcagagcatttgaatgggagttttatatttctggttattgaaagcaaattatgcttaaacagtaagaaaatgggtcatctaaaatgcttgggttttcatcccacatgaagggatactccctgaacctagacacaagggggtgggcctaggccctatcccaaaggatatgacagactctgaagacccccctatggaaggcctcacccttcctggggagcagaaagggtatatgataggttgggtgttagttggtgggggcaggagaggagggaagggagaggtacctgggattgacatgtaaaataatctttcgaattcaaataaaaaataaaatatagatcacaaaataaataaataaataaataaaatgcttggggtttaaacaaaccattgtcaatctaggattgactccatgtctagtgaaaatatcaccagatgcatctgtggtttgattactgaataaatgaaaaaattaaaaatgagagtaaattcttcagcaaagctaaattccttgggtagtgactgcttataaagtggaactgtacaaagataagaaaaggccacctctaagtactccaatgtttgagccacattatacaaggcctagaaatgtccttggttactatagtcttttgtgccctgaattttaaagatgcaaagtatttgactatctggcttggacctcttgatgtaccaaatacaagaaaagaattcaaataggggaaatgtctcaggtcttttacccattcacaaagcagatacatttgattaagtgagttacctgaagaaaacacatgtttaggaattcttgcttgtaaactttttgtacctgtacttaaaaaatgtcctagttcaccgagaaattttgtcttgagtccacttgcattgtgtcatgactgaggtgtttcagaagacaatcctcagttacagttaaaggcatagacagtgctgctttcaggaactttttacgggggtagtttttatttgcttttatgagacaagcttccaactcatcagatatttgaggatgattttttaatctcgattcactccttgcatcaggaataatcaacatagttaaaataaaagaaccaaatgatataacttctctctgtgtcctccgattctcacactggaaagagaattggaaaatgagagagagcttcttcagtcggcccacacagcatcttctttcttgccacccatccactacagcctgtcctcctttgccagtgatggcctctcacttccgttttaagaaagaaaaggttaactattgaatacttgatgtctccataaatactgctatgtctgaagcaaggaaagatcagttcaccattgggaagccatgaccttgtagttaaattatgggttttggagaatggcgagctagatccaaatcctgccttatcatttaccatgtgacctggtgtttcttcatcggtatggtggagatggtggcaagagatatgtcataaagctgcactaaagatgaattgaggcaatccatcaggcatgtttaaacaggacctggcaataattaattctcaagaatgtaagtattgttactggggtaaatttgtcatcaaagaggtaactacaacacaggactcctttatgattacgttttgcttttctgtgtacaaaaggttaaacatagtctacattagtaaatgggtttttccatcgtggaatttaaaaacttgcagttatctatctcatctagacagaacccaggcaagggtgtagctctaccatatgataaactgtcaaaggatatgatcagcattctattcattgaacatagacatatgacagcagaacactttgataatttcccaaaggagtctccccaacaccttgttttctgttgctgttgtttttggtcagggtgagtaaaacatgcttaactttgctacatttgtgtgatgggatcactgtgggtctatataaaaatcctcatgacatatctttctcaaatggcaagaaactatttcaggacttcacatgctattatcaggctcttgtgactctcattcagttctgttcttttcatttggtgtgattgaaaagcattaaaatgcattcttgctgatgtctttacctaacaagagacattcaatctaccccataaaagagtggaagcagtagatggtggaagtgaattgttttaaactcccatttccttttcacattattccagtggaatggttgttagctgtactgatcacagctgattccgtatatgtgtgctaaccaccgaatgtaatccaaagggcatttcacattaaaatgactttgcagaattctctacttaatgttgtttatgctacatgacaactgctattatttcagtgccaaccaaatacaaaagggcattaatattcattagtaatgttacagctgatgactccttaacaacactgtaatggtttgaatagttatttcaggcagtatgttgaaatattcgcacaatagccctgattgacacagtgcatttaagaagcccagtaacttcaaaggaaaaattctgtacatatatgtacaaagctaactaaataaatattttagaaataagctccagttggtaggatcctgcactgagcctggagtgattaatttttgaatgaattgcatagggtcaatcaggaatgcagaaatttggcacacagatggaagcctcaattttatcatccaaattcaatgctactattttgattctataaattgggtattgtgtcatagatgtacctatagaggcagctctaaagataagcatgcggcaaaaaccaatgagcactgaaagcagggattctgagatgaaccacagtatggaccacacatcattttgagattttgtatgtgttatgtgtttgtatgtgtttgtatgtattcccatctcactgttttagggaagttttaccaccagttttccccctgtggaaactaaaggcaagaagggttctaagtcatgtatacacagctggccaatgagaaaccctgctgttagtggttgatgttgatgaagttgaagcaaggtaaaaagcaaaaaagctttcttgaggagttatcctacttcatgctaataattatttcacaatgtccatggggtgtcagtcagctccatactacaacaatagaggttctgacacaagctacttgagaagtagtggcaggttcagtgaactcatgatttggaggtttaggtcccagattgggcagcccagttgttttgagcctctgtgaggacggagcttcatgatgggagaacttgtggagtgcatgctcacatcatcctcagccagacagcagggcatgaatgaactgaggacacctctgtgctcctccacctaaccacccacagtgtctcctaaggctgcttctctggcgatcaacccattaacacttgggtctcctgggagtactgtcagtgacgaaactggatcaactatctgtaaaatgagagtatttatactttttgttcttaaatgtttaagatttaccaatccccttttccagatgttggtatttaaaatatacatgtaggagatattttttccttttgttttattaggaattaaccaatattatttcatttatatttcagttaaataaaattacatatattttgttctacaatgtgacattttaaaatatgtatatattataaaataggttctttgagctgattaacatatatattaccaactatttacttttgtggtaaaaagcccttaaacagtactcttagtgttatattttcaaaacacagtgccttgatattaatgctagccatcatattttaaaatagatctcctgaacttaatcccaatatctaacttaaatgttaaatccctaacatgtaatttccatctatatatgaaatcatttaatgtttgctttttctgtgtctagcttatttcacttgactgacatgtcctctaattcttccatgttaccataaataacaagattattttaattttaagcctattattttattctatgtacctcattttctttatccatttgctgatagacaaataagttgatcccatatatttttccatgaataatgctgttgccaccatgcacatatatcctttgcccactttttatgagaaaattaaaattcttctaaaacttaacaaaactataaagtgatttttttaaacatgcgtgaccccaatagagagatcactcaatatacatttatataagcatttgcacaattaatatatatgtgtgtgtatagatagtttcatatatacagatgaacatatttttgtgcagaatgttttctggcatatacatctctatgtgactcatctatagggaaactgtctttacagtacatattgcattgcatgcccctcaattttccatactaataaaagtaacaggtactgaattccacccttggaaagcttcaatccataaacccctggacccctccatcaatccctattgtctgttcctctcttgctttcttaaaattaagttgaagtacccttggtgcctattgaccaattgggtggcaatacctctgaatattaattcttagagaaacaaaagctgatgtactattgcaatttcaactcatgtggggactctgtgctttgtggccataatgatgtgtacattgccttcatacacatggtttctggaaatgtttatataagcctactttacatttgatgattatgttttgagctgtgtataaataactatgctcctagatataactcaattataaaatgagctctgggtatcttctcggagcaaagaggagagggaaagttctataaatatttaagttggcagactctgagttttacgttttttaactcttagggatttgaaccacacttagaggcatgctcctgaatcctcatcctcttaccccacactctactttcttctttttagatcaagcccataatcctgagtgacaagaattacaaagtggatgatttaatcagttcactatggtcaactcaggccctactttattatccagaaagtaaaaaccagcatttgaatttctaaattgagcacacattttcaaatagaattttcacagctcattgcaagcagatattatggccatatgagtaaagttaagaccagtcagaataaataaatcatttctcatttggggtgcagttgcttatatgtgctcctgatttgattattgcaaaacccattccttaccatttgtttgtagtagggtgtgtgtgtggtgaggtgtggtctgcctgtctctgtccctatctcatctccataccattcttctgtgggatacttttgattggaacatgtgtgtgtgtgtgtggtttggtgtgtgtgtgtgtgtgtgtgtgtgtgtgtgtgtgtgtgtgtgtgtgtgtgtgttttgtaatataatttctgggccagacacatgatggaagagtgatgaagtcagaatctgtgtcatcactgacccacctgcatcttctcacttccctaactagggaacacagtgacagttctgtcctgctctgcttgtgaactgtggaatgtgtagtgctttgacctgaggtaaataatgagatggagttagttaagtcatgatgtgcagagacaccagctactgtggacgctgttatctctacagcgctctggtttgggtcttttttaaatgatgctcaccagccgttgccaaaatatctgctgccttgagaatagcattgaccaaaaaggacagatgtatatgccagaacaggattgtaatgatatttcaatgtgctacaaatgaaatgtatacggatagcttactatactttgattctacctctagttaaagggaggactcaccaacattatgaatggtccaggactgaggacaaatgtagatcactaaagtcatcaagtgaacttgtagcaggagagatgcccacaacctctagtgtagcatatgaatatgtgcagaagtacatagacaccagggcagtgattgataacctttgacattacttacaagccagacatgtggacctgtgtccataatcatcaccattttgtagcaatttgttagaaagcaaatgctgcgccattccttgtgcttttctagacaatcatctcaagtgaagacaaacacaaaccttaaacaaagggactttataaatgctacattttccttgtttcttccagatgtgcagcccctgactggagatgactgtgtgtatctcatttaaaaaacaacaacaacaacaaaaaacaagatactagtgttagtctgacaaccccaagtccatttttttaagaaggaaaatctttacccagtcattcttagagttttcatgtcccatataaggtcttgtgggtctttagcaaacacccattctaaggtccagtgcattttcaatttaatttaataagcctataatgcactttgatacagaatgacctgactctctatcttctgaaactgttttattggagagcaagaaagaacctcttcctaccctttagtataattcaatagaacccttgggttttctgatttcattatgtttggcaaattctgatttgtttatatgtttatgatactggtaatatataatgtgtaataaataataattaaaatctagcttgataatggggaaacatgtagttaccagttaatagaattatcaaaggaactttgttaagcactgcattccccaaatttaattaaagtcaaacttaagttaataagacttgaaaagttatagttgactacatatgttacaaagatatctgtgcttctatgtgtgaacctacacaaattatacttagataaaaggcaaagggaggaatctgaaatgaccatgtttggatgacataatatgaaattcttatcagcactcagacacaagtgcacacgcaaatgacttgtaatggcaaatgtcactaacagaaaacagaggaaatcatgtgtttgtaggtaccaacaaatgtttgtgtttgattttttaccccaggttctacagtggagagatgctacactgagaaaagggcttcccttaacaacattatctaattcattataaataacagattattctctccaagaaattatcaaaatttgaaatggttcactttaaataatcagattttaggtgccctatgctgtgattaaggtatctttgataggtgattagggagattgttaacaattaaacacctacaaaaatgacggcgttagctcttgctagatgaaataaagacaattatgggaccaatcctgttaacatgatatgatggacattgagattaagatgagttttgtagcatcaagctggttttactgttttgttttgatttttcattagaaacacaagtgtaagaaaacactggtattggattacattcaagttaagcacttttagttatcaagagtcacaactcagacagtaacagcactaggtgccaagtgggaaaggctatttttttaggggggtgtttttttctttcttttatatatgaattcatttaaattaaaaacaatcttattttacatatcaatcccagttccctctccctcccatattcccatgccccccaatgaaccccaatcccatcccccatacacccccccagggagggtgaggccttccataagggatcataaatatctgtcaagtcatttggggcatggcctaggccctcccctgtgtatctaggctaagagagtatcccttcatgggaaatgggctcccgaagttcgtttgtgcactaggtatacatcctgggttcactgccagaagccccatagactgctcagtgctcctagctgacacgttcagggggcctagtttggtcctatgttggttcccagctatcagactggggtccatgagttaccacttgctcaggtcagctgtttctgtgggttttcctagcacggtcttgacccctttgttcatcactcctccctctctgaaactggattccaggagtttggctcagtgcttagctgtggatctctgcttctgcttccatcagctactgggtgaaggctctaggatggcatttaaggtagtcatcattctcattataagtgaagggcatttaaggcagcctctcactattgcttagggtcctagttggggtcatccttgtggatccctgtacaattccctagtgccagatttctctttagagctatagaggctccctctaatgctgtgtttcttttcttgctctcctctattcttctccccactactcaatcttcctaattcctcatgttctccctcccccaaccttgggaaaggctctttgtgctgcttacttcttctcattagaattgtatacaggagagaaaattaagacagcatatcaatagaagacacaacataaagcaaatgaacagattttaataaatattccataagacagacatccaaatggttgacagacataggaaatattggttaaccttgtcatccagtcttaaaagaaaaaccacattaaactaaagttgggatctaagtaatagcacaatggctgatgatactaaatgtggatgagggtatgcagccactgcaatgcccatgcattgttggtagagtaaaaattttttctctgcttcttgtaagttattttgtaagtagctatcagaaatgtatatgtagtggtaaagtgcacatacatacatatatagatggggtacatttaattgttaatggcaaggttgtatagatcacttataaaagctgtgtttaatcacaaagaataaacaaacatgagtatgtctagagagattgctcattttttaatatcacatgctgttctccaaatccagcttccagcatccatgtcaagcagttgaagttacaaccacctgtaattgcagcgccagggatgctgacaccctcctctggcttctgcaggcaaccacatacacatgccagacccaagtaaccataaataaaaatgaatacaaatgtgggagtgtggccacaggatctatcaaaatcatttttagcctctcattagttcaaaaggtggcaacaattaattacaaaactctgagacaaagcaagataaccaagtgttttataaagtcatcttatgacttccaaaggcttgaagtcagtccagattacagaatgtccaaggaggcagcaagatggcagtcctgctgcttctgctgctacagatgctgggcatttactgaagtcagcacgagaaatgtgggtgaggttcatctgcctcccagggtgagtgtcaacaagcctacatcaaaatggagaagagcactcccaagttttcgggcttccagggaggatttcaaacatctgcttgtgaagacttactgagatttaaatcaaaacatatcagacttattggtcaagttgcatttctcaacccttgcatgtgtttggatggatagtctaagaggatgccctgtgtgtgtatgtgtcattagtaacgtctaccaggtatgattacaaaaaatgtctccagacattacaagcttttctgggggagggataaaactacttctccagttcctaatgggaaaaacatagaataaatagctttacatacaggaaaatgataactttgttatatgcatcattatatttttaaaggagcatgtacaaagtatattgcattaaacactgagggggataatacagaaagtcctatttttgttctgtttataacccatttggagataatactgtttagagttaatatcctttttcatatcaatgggcctaaattcttacattttagttggattttttgccagttctttgccggtataaattagtcaattctgaaatcaactatcagaatagctaacttgtgatgtatcattagaatagaattcttccaaagaggtaaattctaataagacctgctgagatctcaattccatctgcttgacatttctttctctctttttatgccttttgtatcatatcaactacagtaaaatgatcatttctctcacaatgacttcatatgccattttgatcatgctggccaaacaccctcatctcttctctccttgtcaatttttacgatttctccaactaaactctcagctcaaagttcccttgtacatttttttcttttggtttttcgagacagggtttctctgaaggtttggagactgtccaggaactttctttgaagaccaggctggccttgaactcatagagatctgtctgcctctgcctcctgagtgctgggattaaagacatgcgctaccactgcccagctgtttgagtacattttgtgccatttatgtcacagtatgattatcccaattcctcatacatgatggatactatataaatatatattatagatcacaaataagtctcaacagtactgaattctgagatttccaaataagaaatccctggagaaataattacatttggtgcataaattagtatgctggctgtagatagggtcctagatctgaaattcattctaacagaaacttttaagataattatggcttgtgttgattttgttgatgtgctaacttatataacaagaaattcttgaccccatcacaagggcaatcctattctaagcacaggaaataaaaaaaagtgaatacaatttattgagcttacctttcgatgcaggaggtagccagcaaacaaataaatataaacaagttactattgaaaacagaaccataggaggaactatcaaaggaaaagggaatctattttagaagggctagtgacagaggctttgtatgaggagaaactacatgaattgcatggaaggaaaaagatatttttctctctgtgtgtccaactagaactccagctgaggccttgtaaaccacactaaaaaagacagattaggaatagaaaaggttatatattatttacaaagtcttatatgatatgaaaacctccaaaaagaaatatagacaccagaatccattaaatctgagtgtttttgaagtatagacatagaaaaatgtactcaggaggaggggatatgaatgagccaagagttaaagtggggcaagtccttcttggctggattcctctccagggcctctgtcctcagagatgaggatgctcctttcttcttagtatttagattgcatctctttggcagcagcagtgaacagagccaacagatatctaggaacgtatgtgtctcggtacaccaacttggtttgctggtgggatgaatctctgcacccagaggaagactggagtcaaagctgagagctaagattttgccattcactgattgacaagacagacaatgtcaaaatggcagtaggatttgaaacttactgaaacatgcaaatcagcattatttaaatttgtatcttactctttctgagcagtgaatggggttgggctgggggaggcagagagagggtgaggaggggaggaagggagagctgtgattggtatgtaaaatgactaaagaataaaataaaatattataaaatgaatttaaaaataaaatattaaaaagctgtaaaatctgaaaataaaatagatttgtattttagaactctattatctggtctgtccatatatatgtttttaatttaagtttttatttaatttgcttcctagaatgcatggatatattttattgaattttgacatttatgtctgtaagagttctgattcataatttttcttctagaatcctttctcattttcatttgtcaggctgttagtgaaagggcaggtcacaggactaaactagctcagaattaggtttgtatttctataaattctgatcaatttccttctcccctttgctcaaagcctttgagcaccttagagtcaagtctggtgtaatccccatgatagtgcttagttagtaggccctgaattccaatctcggcctcccaaaactgcaagatttcctcacattcataatttcttagccttcagtaagccttttttgctggatgtttgattaaggaattctcaaattacccaaatcaatgtcaggctttcttgtgcccctttgccttctctgccagctcttagctccctgggttttgcaacatgtgaagaaatggaatctattctgaagctactggggagttttgtataattaaataatatgtgatgtgctctgatttgtctcaaagtttgctctacttacatcaatgtaaaagaaggactgcagaagtcaaatgtagctgttaagaagccaggagaaaacctccttcaattggcactttgcaggcaagaaacaatgaggacctgagttattacactaggtataaaatgtagaagagaaaacagaagcaagaaccatacacaggagataggtttataaatgaaaatagaaaattaagctgtcagcatctcttaaatgtgtgtgtgtatgtgtgtgtgtgtgtgtgtgtgtgtgtgtgtgtgtgtgtgtgtgtgtgtgtgtgtgttgtgtgtcaaaatgaagatgacaggttgcctcattaattccatatccctaataattttaaaggctggtcaaggatgagtggcttctgaacaaaataatctactctttgatatttctcatggttctgatactattcttggctgtacagatttaaagagggatgtattttaatttcccatcattgttcaaagagcttgcttaagttagagagtttatatgcatattctccttgaagagaggcaaatgtggcatacttcaagaaacatagaaaatatttaaaaccaaacctccattattctgatggcaatattttatggaagaagttgaaccactcagcttgaaggaatagcaagctgagctggtactatgcaccatttaacaacacagttgagatgaggcgcttgttctaaataagtcatttagtattaaaatgggtagaaaaataataacttttaaggatctgctgtaaaccatgaacctagtgtgttttgggtatattctgattcattttttttaatttaagtaagatacacatataacatgttttatgaagccaaatctaaatatttggatgtattttgtttgggattaaataatctgtaaatatcagaactgagactgaaaattgaatgtgttttactgttctcctcaaagagtcacaaatatgcacctgtcttacatttggaaaaaaatgtattgaataagcaggaagggggaatgtggattgtattatttagatttgagtaaagctttgcattattctccaaaatgaataataatttccactaaattctccccaagtaaagtaatatgtttattcataaggatatagtgcagctcatccgactattaacttgaatcctggggcatctcctgggctctaatatgatctcatccccccaaaggttaatatacctattgtcatcattgattcagggacagaataaccaggtattttaaaataacccagtcacctttcctctatcctgttattgttcatgggatgttttcctgtgtgcatcaacaaaagcagtgaaaatatgacctagatgagaaaaatgaacagatgtgctcacagctggcagtaatttggtacctaaaggaaaatacaaaatgggcttaccattcattgtgtggttgccttgttgtaggcatctaatatttaactatcttgtttaatccttgtcacattaaaattataaggtatatacttctttcacattagaatttactaaagtccagaaaaataaaatgatatggttaattacacctaaatcctgtaataggtgatgaaaaccattttaaatattttcattaattattaaagaacttcataaaatgttttttatcatagccacctccagctcctccccctaactcctcttggttccctctctacttgcctaccctaaaatctttatgtcttatctttaaaactaacccatcaaatccactgggtgctgttcatgtactcctgtgtttgggggcatccaatgaaaggtcgttgatctactggaaccacacccataaaaaattacttcccctcctccataagccatcaactgttcatagctctccagttagaggtgaaggctcataaaccctttcctactccaggctagaatgttgactggcttgatcatgagcaagtcttgtgcaggaaacgacagctgatatgagttcatgagtacattgatccctgtcattccaaaagacgtcattttactctagttatccccaacctctggctcttataagctttcccttcctcttccaccatggctcctaagccttgggtgggagatagatgatatcaatactcaattatggctgacacctattgaccataagcttctgttaatgatagtccactacataaataaataaataaataaataaataaataaataagctaaaaaaccttatctgatgaggtctgggatctacaataatctatggatataaaggcacaaatggagagggcagttgaatgctatgtccatttagcagaataatattataatcactcacggagtctgagttcccaaaccataggttcttggctggatttacagtaccagacatatgtttcctcttagggagttggccttgagctaaaccagaaaattattggttgtcccattatatttgtgccactcttgtaccctctgggtacattatggcacccagggatattgaaaacttttattcttaaaaggttccaatatcttggtttaaaaagctcagctaaacaaaatattctggtaagacactttcaaatttaaaatagattattatataaaatatattaagttaaaatgcacacagaaaaccaaatactaaactaaatatagatcctaaactccaaaatatcccttaaaggaactggccaaggaaataaaaccactaagctgagctctcatccatgagataatgtaagttcagttctctctgctgttaatgttttcatgataattctaattttacaagtaaccttatctgtaaaatggcaaagatgacttagagatatctgtaaaatactttgaatttctcaaagagaattatatataaatagaatttagcgagtgattagtaattccagtactataaatgaaagaggcatgaatgatttttccaagttgctctttttacactgtgcatttaccataaagctgtgaaatcctttaagacactttggtatgcaaaacattacaatttccttttgttttaatcacttcattgattcacatctattccagtgtcttgtagggagcaaaaaactagcttatggtcacaagttggtcataagagaaaatgaaatttccagtatcttttagaatgataattttcagttattgcttatcaaagccactgctttttaactaccagaaaaattagtagttgtgtttgttaattttgtaggttgtagacataaaatttcccccagattttcctggcgttttgttactgacaattaagttttggaaaaataaatacggtaatgaatgtcttgtccactgtcatgattcatgtttgacccagttttcaaatgaggagtatttctttttcattttgtgaagcaaaactttacaattattatttaagcattaaataccaatcataacttatttgggaaatgtcggctctaatgctgaacagtttagagacccatgattgaaagtgtttcttggtaatgaaattgattttctgccttccattgttgaagtcagggtgatgagaaagtatcctggtgagataagaataattcggtctgatttttccaagcagataattttgttcagtctttgctacccatctttaacattttttccatgttcaaatactttcgtactaagtgaaatttggtagatggtttatggagatgacagattgattgtaagtaggtatgtataaaaattaggtgaatttaaaatgtgtttatggtagtcattaaagtgtgagatttcacttgtattgattgacttttcagaaatcatttctctctgttctattttcagctgaagtatttgagaattgaaaaaattctagttggtgttattagaatataataccaatgtcaatcacagacaattcagaaatgcttcactaataagttgataaattcttacctaagtcagttactgagaatgtaactttagcattatcatgaacttttatttggtgtattatctcatattttaaaatccaagaggacagataaatttattgaatcctgacagattcatgttaaatatttcagttcattactaagtttgtattgcttacataaacaagagatgagagctatttaccactggattaacaattgaagaaaatgcctctccctcccccagcaaccatcaattgccaatagagttcattggggacatgtagggtctgatgagacctgatccaacatcatcctcacagacagttggcaggctcagtcctgtgcagatcctgtgcagaaaaccatgtctgttgggagtttaggcacaaaacagccctaccccaaacaaaagatggcattccaaggcaattttcctaacctcaaacactttcattctttctacccctctttggaaatatttcctgagccttggaggagccaatatcaatgtctcacttaggactgaacactcaactttttttctcataagaataagttataagtctctacagtaaacgcaatccagtgtaaaatgaggtttttgtgaccaagactgtgagtagcacagatgagcattctactgaatctttaaatggtttggctaaaatagccattttcataatattgagtcttcagatccacgatcatgggaaatctttccatcttctatagttgtcttcaatttctgtgctattttaaagttttcattgtagagcttctttacttccttaatgtattaaaaaagtttgatttttacttttaaatttttcttattaaacaattaacaaatgtagtatgaaatcattgcacatataacctctgtgttgaatgtaacattaccagtttgggatattgctatctatctgtatccaatctcatactctgaaataatactttttctgaatttttcattaagatttcattcttctagtttgattatgcccatgtgggccactagatcgtgtctcatgcttttaaatttttggtttttagagaatatgttgtctttagagtggacaaaggacaccaggagaacaaggccctctaaatcaactgaacaaggctcatatgaacacagagactggagtagcaataatatggcctacatgcatgtccaacaggtcctctgtatatgtattatagcattcaacttagcgtttttatgggactcctgggtgtgttaataagttggtctctgattcttgtgcctgctcttggggctcttttccttcttttggattgtcttgtccatacttgatgtgatggattttgttttatcttattatatttcattttgtcattttggttgttatctcttagaagcctattattttctaacaagagagaagaagagagttgatccagagtggagggtaggtggagaggaactagaaggagtggagggagtagaaactataatcaggatatattgcatgagaaaaaaatcaataaaaaggaaaaattacattgtattgcactataccttcagtaagaacatatgtactttatttcctataactgtaccccactcctggttttcaaattattttctctcttaactagttcttccatactttctttaaaaaaatatttaagagtttttttgatgttttgtactatgaaaactttctttgtacatttgatccactattactatcatattattcatggtatgtagtatgaggtaattatttcacattctctgtggaatgtatttagagaaggtggatatgtatgactttataagatcatagctgtgtaatggttgtctgaaaataaattacataagcttataattttatgatgaggaagtaaaataaatatgttgtcacaatattggctttgaaatgataaattgtgaatatataaaaattgctcagctagattaccacattatctgcccaaacattatatgttaaaagagtactaagaactcaagactgcctgatggacatgacatgccaaaagaaagttgagtgttagcaagggatacattatttttcaagtaagtacaagtgcgtgggcaaaatttactaaatagaaatttcttaagacacatgaactactctttatatactaagcaaaccatcgtcaatggaaagacattgttgttagggttgtggaattcgaggtgctttggttgacaagtctttaagcctgtacttgaattgattctacacagatacctctccagtgaagtaagacaaaaaagtcagtgctaaactccatgttaagagaaatcatactgagagtctagctccttcccactaaaccacactggtttctctactgacttgaagaggattaagtgtggtttccagtcgtgatatgtttgctgttaacaatttacaaatggacattaggaagtctatactatcactattgtatttccctttacaaaatttctcctcatctaatgtcaagtgatgctcctaagcttatgggaacaaatgaccaaagaggaagctctgacaggcacacagaggcctaacagaaacacactcactctcctcaaaccaagaccaccacattaggaagccaaagtcactgaataacattaactgctgttattacttctttaaacaaataactgcctgcttgtaatattcttttgaatataaacaagtgaattatttataagaaaccattaaatagaaagatgttacaaatgctttgtggactacagaaaaacatatgtaatgcaataatgactgggccttgagaagagtgttcatagggtatgagttttaaaatgtgtctgttttcatcttctgaagaatctcttaagtggagtgttagatttcccttcatagaactcatattcaatagagagagaaaacagaaagaaaaaaaaaaaagattcagttctggtgtgaattcccagttgctctgtgcacaaaaacagcttaaagtttagggaggactgcttgtttttatttcctgcgagtgcctgactctggcagagggctaattaagttcgtgcaaattattgcattaaatatgcttcggccactattggaggagcattttgcatccttaggaagtaacttaaaagctaatacaccagataggacaatgaaatagcttgcaagaacagctccatctgtccagtcactggagacaagaacgtctggaagtttctaaacacaacctgtctactactctactacttagacattctagtaaaagtccctcctactgtactggagctaatttccagaatgtagaatagtagctgttctgatattaagataaataggtatcatagtgtgtccccaacttctaaatctctcctgtctcagtggataggaccaacatttcttctgttacttgggctctgggctacagtttatatctttaccttccacagtcaatatttcagaaagtcctgttgacctgaccttcaaaatatgtcccaaatgcatcactaccacagctgtttttatttaaggcatgattatctccattgtacagtagtaaagtctttgtcccggatggatatactgtagtcttttacccatagtgtagctccaatctcataacactaatttggaaattgtccatcttcagtgactcatcattgtgttcagattaaaatctagactcctaggtttgaactgcatgcactgttctttctggaggcatgctgatgcatcacccatggctctcttcttacttctcagtagccagattaacattcactggagtctctgaccctgtgactgatgttttctttctactgaatcattgcatcatacaccatgtattacatgctggtcactatacaaatgccacttcctttttcccagataaagcactaaaacagcaacaaatctctgagtctctatgtcttctctacatagtctacattactgttgtaattacattaggtatttattcatatagctatattatatatttcatcaaatgatgaatatttatgtgtaaatggactttgtaaagctctatttaaatgtgaaagatggttagtgaagcagaatttagtactttataactccaggataatgataatatgagtctaaaagcctttattgacttaactaattaaaattattttttgtttcccttgcttccttctttatcctgaagataattgtttcctggccatttagaggacactacttaatttttaatacttctcccttcttacagtatttttattaatttatcatatattcttggcctcatagtatttactctatatgcctccagtaatattttcaaatagtttatcaaattaattgagatttcaaataatatatgtctcattagaatatcaggctacccagatattcacaacatctctactatctgaaaatagtattttaaaagcatgtcactaatacattctaaatttactaaagaaaaacatatctttaattttccatcaaattataatgcagattcaaattatacctcacaattttaagtagacaataaataatatatcctaattttatacaaactgaccctttatttcaagtagttaccctaaccagctcctccacatgtcaggcttcagtcttctgtcatcctgtctttttggagcagagccatttgtccacgtaggttataggtgaaataagtatcatcatggtcaccaaagacacttgggtgtttgctacctctcttaggaatatggaatctgtctttgatacattgcttgggtcctttgtgcctagatacaaccattttctatgcctagaaagctgccagaaggcacacatcacacagcccccccatacacccccactctcttcacccaccctcccaccaccccagggaactgcatttcatctgtttggaagcctttttcctgtgagtatttgtccaggatgtttttcccaatcccgttgttctcagttattctataaatgttctcaatttccttgagggtctggggtttggaaacacaaagtcaaagtgaattgcaatgaatttctgtttctgcccttccagatccctcagttgagtcagagaacgctggaccaattctctgataaaactggggtgagatgaaatcataaatactgaggagtaggaaaaaccaggttaatagcacaaaacaggatctcttcataatgtttttttaaattttactcccctgtataaaattcaaacaacggttgagtatcttgctttctaaatagtttttatgtatcaaatagggacttgcaacccctgccccttattttccccttcaaattcagtttgcagtaagctttcaaaatcataaatttaaaggatccatgatgattctttgatgataatacccaacatattcatgagacagaatgaaacattgaaggtaatacagaggattgatgctgtgggtgtggacttgcctggttcactgactcctgtacatcgttttactctttagaaataatacctggaattaataacagtgtctatcatccattacagattgacccatcatttcaacaccatctagacatctgtgtatatatttccataccagagcaaatgtgtcgtttgtcagaattcttcttatttaacctctgtgaattgtgacatagttttgaactatagcaagaattccttttatataaaaaatgacagctgtgacatgtaatttctacttgctacagcctgctggaaagaatgtttttgcagaaatccgtaaatctccaatgggctcagtaaattggcctaaatgtgttgctcacctatctatctatctatctatctatctatctatctatctatctatctatctatcttctatcatctacctatcctttttctatcaatctatctactatctatctatctatctccctctgtccttccatctttccctctttcttatttgttccttgacccatgtgttgtctctctcagtgagcactgctaatatcttagcctctgtgatgcaggttacaaggctttacctgacagctctagtcaccacactttggctcaggttcatccacagccaggtatcatttcagatgcttgggttcaactgcaaactaataagtctcaggatataagaaccctgttatttcaggtggcactgttccttgtcatgagtctagtttcccggactcacaaaaaatgttccataattttccagtatcttgaaactacattggacttcactaaagcacggaagttacaagcaggattcttggcagcccctacttctgatgccattctcaagtgaacttctgatgtgattcccaagtgagctacattattttagtattagtatggttttaaatcaacattcatgtgtcagctaaacatcatggaccataatatggccaccagacaaagctggtgctaattaggttcttttttaattacttactactgacaaatgattccttggcctcaacaaaatgctggtggcttcaccaaaggagcatcctataagggttgcttattattttgaattaaatgatctagcatgtcatttctatagtaactataactatataaggcagcactttaattcatgggaatcttgtccttagtcaaccttacaagtgtgtgcatcttccccaggcactgaattgatttactgggcaaatgcctgtcagtctctctttctcccttactttccctatgccttccttgttatttttctatttctttctgaactaagtctataaagccataatcagtcatgaacattgagatttgaggatactgagctaatacatcatctcagaagagaagaccagagggacagacaggggaagattcctgcctccccctcaccaggtaaacaaaaaagtttacataaagttagttggggtctatgatagagctctgttgtaacaacaacctctctcccattgacagagtctaggattagctcccagcatcagaaggaaacaaagttagagctagtgcaagaactgtcccctgaccctcaagtggttacagtctgcactaccccatgtcctaaagctagttcccaccaattcaacagtcctcatcatctccactcaagccgtgttcagtattatctagctagccccattctttcacagatgaggcaaccgatggcaagaaatgctccacagtttgaccatgatcatacatccagaaaaggaaattcatgaaggggaatcctattctggggaaaatctggccttaggacatcaaggaagacagactcatggaagacagactaagaaacgagacagaggcagagagttagtgtcctagcaagcttaaaagaatgaatctaaaaaagaaattattagaaagaattaccaatgccccattaatgttgccatggtgctagagtatttgttcattaatatatgtgagcaaatggatgcatctaacaattaaatataaaattggttaacttagaattcagttgcaggactaattatttagtaaattcaaatggtgttttgtgtgattaaaaaaaaactgctaacagtaaagaaagataaaataaaaacaaaaagcagttctactcttcccagtaagaagtcagtctttattaggtcatacaaaatagccaaggataagaaaaaagagcttttatttttagtaagtagtaaaggaatggatggctgactttatgaaagaaacatttgtggaatataaaacaggtttatgcctgacttaaaatacaaaccacttgagaataaaattggtttaaattgtctgggcttactttatcatacacaattctcaacaaattagtatcatgtcagccatcaggcaaaaacagaacaaaacaaagccttatctatctagttttggtcaatccttcacaaaattgttgatgaaccttttatttgagcttgacctatcagaaaaggggtctatgtttttcttgacaggagtgaaggtactttggaaatactacttgatacttaaagatcattgcatagctaatttcctttaccaaaataatgggccaactcacttctaagtaggaagtcaatatactaaatgtacaatatacacttagtagccttcaaataggtaatattctgtggtaatagcctcccaatgactatggaactgagcataggaaagtttaatgtatcacaatcaaacattcttacccctcttcttatgcaaaattctttgtttcaagtcaataatgttacaagtagcttatgtaaaattgtttaaccagattaaaagcaaccaaacaaaatcatctctgtagtgcctacttcgaaacctaagttcttttgtttgtgtcacttcaatgacaaattctcttcatgtaaatcagaagatgaatgagtaaaattagaagagaacgctgttggcaatgatgtaagtttaagtttagtttacttgcctgctcctaagacagagtctcttggttggcacctagtttgaggtttgctctcaaagggtggtcccttaacagcagcagcagttgatgaccaaattcatgggactctatcccaagactagaaaactctgtgtcagggaaagctatcagtcttaacaactgcaatgcacactaaagcttgggaatataggggaaaagatcataaagatgactttgcacaaaaatagacacacatccataaccccttgccccacctccaagagtaggtgaaagcactcattatgatagcagagcatagctctatgaatggttgtatttcatatgaaatcactgcattttataagccttctcctcttcatttggtgattattttgataatcaagtagggataagatctggcgaagaaggaagaatataccaaagcaagaagtagaatgaggtgagaaactgacaaatatccagaagatgacatcactgaggaagcctgagaaagacatagagaagcttaaaggtcaacagcctcagctcccaggccagctccaatgccaaccattcagcttctggctctcctttggtcccactgatgtcctcgtgatcaacactcttgagattaagcttatttgagttgtcaacgcctgtgttccaaggggccctgccatttcttatctgaaaggcataaataatgcagatgttgattcccacagatccctttgcttacctgtaggttaagcatgacttagccttgtttcctaaccttgggaaacagcatccaaagctccccctatgcattatgtttgaagatcataaaggtatttctctttgacatttttatgctttaaaacacttacagggaagaatcatttatgggaatctatgtgaggaatatgtaggaaatctttatacttactttgccacttttcctgtaaagttaaaattacttcaaaaataaggctttgagttctaggtgccctacatttcactgcctttctttttccctcctttttgctgctagacgggtcttttcttatgaaatacaaagatccccctttccagacttccttcacatcattcactaagtatctaacgattcagcccatatgtcaaacattcctctgtgtgcatatcatatcatatcatatcatatcatatcatatcatatcattatgtcaatagagatcttcctattagtagtatgctgctctagtcttatgtaattttgtgttttctatagtttttcttgcttttgttttctaattttgttctttcatgatcaggcagaaaacaaatcttcccaggttttgttttgttttttgctttgagtcttaaaatatgaactatcttatagaaagctctatgtgccactgaaaagaatgtgtcttctcctatctttgagtatattgtagttgtgtattaataccatttaaagtataatggttaatgctttactattttatttttaaatgacctattggtggaatatcatattatattcatctatgattcctgcattgtagtggatcttctactcctttccatcatgtagtatttgtttcaggaaattgggtttgctgttatttggtgcatacatgtttatcattgctgtatatcctgttggtgggttgtcctcttcatcaatatgaaataaccttctttatctctttaagaaaaatgccttgttcatattttcttacttatccttgcctgatattctaatttattaaccttgccttcaagacctattatttgtcttctacttgatctactgtattgttgaggctttgccttggctatttgatctgttaaacttttttctctaaaatttcagtttgattattgtcagtattgctatgtctttattggattcctctttcatacttgtatggtactttcatgttctattcaactatttatttttattgtcttttaattcatctaggagtttgtgtcccctttgatttcatgaaacatttttttttacaattaactttgaattattttttgaatacctcatctgagattccaatctagttcactctcatggtaatccattactgttgaattatcatttttggaggctttatgcagtcttggttattcttaatttttgcattgggagttgtacattaagagttagatcactgtatgatttttcctttttctcatcatattccttcagttgaagcattttcatatttaagtgggactacgcagtaaatttgaagtgtcattcctcctaagcagacagagactacacctcagtagtgcaataagtgtgcagtatgacccacacctacctcacatatgattttcctcttatgctaaatggtcagccttgccccacatggatttcaatgtctgaatctatggtgaggccacacccatgttttcatctacattgtggcagaatatagtcaccttacccaagcaatggctacctatttgtcttagtttgagtgagtttgggtagttctgtgtcctctgtgcccagactcttaggaaaggaagcctccgagtttgatgtcacgattgagtgacatttcctctctgccccagagttagtcacaccacatggaatggttagcgttggacaatttcccaactgcctgttttacatagcttgtggatcttccaggaattttgatttttcttgcttagcttctggaacttttcctttccccatcattttggcacccactgtgggagcaggaggaattccctagcttctctgctgatgtttgatactcggggttagggtctgccttttcctaaaaatctagcattcaggatttctggtactctagtccttaactgtccactgatgttgttaccttcttgtctttctatgcctctcacctcttcaagaaaccgacagtcagatgtcttctttgagatctgaggggacattgcagagatctgtttggccctgctccaccattattccttgaatgaatcatttttgaaaaaagaagtcaagtttaacatgttctacagtatgctctagtttacctcaaacaagctgtcaagcatcagggtaatcagcctgtgttcaataaagtaacattgcctttatctttgctaagattaaataatctttccaggttagtagctggtgcaaaaaggaatcttaagaaaaggaacacaagagggaaatgaaatataagtatgtttaataaatgccaaaaagaaaatattttaaactaaacattttaaatgttatttgttcatgtatttattatattttatgtatgcttgtttggccagcaagtatgtctatgcataatattcatccagtgactgccacatccaggagatggcatcagttctccacaaaccagagttacattggtgagcctctttgtgggtactgagaatcgaaaacagatcctcttgaaaggatatcatgatttattttatcgtttactaaacaataaaacttggagataaatattaagcatataaacctgagagaaccacaagcagtctggaaaaggtcacacaatgcttgctctgcctccttgtcctcctctgagggcctctttttcccttctcctgagtcctccagggaactcaatgatccattccagccacctgaacatgaaccctgcctcttgaacccactcccaacaccactggatgttagaccacaacacagacaaagttcttgtaacaaaattcttgtaacaaaaggcagccagtgctcttaaccactgcacaatctcttcattcacaaatcaaggttttttttttaacttcattatttattcagttacaagacaatcaggaataggaatcatcccatatatataataaacatctgatcccatatgggtatgccagggcctctagcacaagataatgatgaaattgatcgaatattgataggaaatgtcctaagagcctcagaatttcatttaaaaaaaaacatgtcaatagcaaaggtttgaaaaaaagatttttctatcacttggtaacaagccaaagatattataaggaaatgtcctacttgttctttgtacaaccaaactctaccacctgaaggaagtaacccgaagggtactcaaaagaatgaaatctagcagatggatgtgttccattttgtggaatttggaaaagtaaaatatgtacaccataccattgataccaggttagagaaacccacagaaacatctggcctgaacaagggggagcacatcgaccccagatgctgtctaggaggccagtacaggactgatccagacccctgaacatgggtgtcaatgaggaggcctctgcactccagggagcccctggtagtggattaatatttctcccggtgtaagaagggactttgagagcccatcccacttgaagggaggcattcttgccctggacacatggggaagggcccaggcccagcccaggatgatgtggtggactttgcagagccctggttgagggccctagcctgcctggggagtaaagggtggatggggtgggggataggtcaggatgggggaggagggatgggagtgtggggagggagaaggagaggggatccacatgtgaaacaagcttgttcctaatttgaagtaataaaaaaaatagagcttgaagtcagggattaaaaaaaaataaataaatatttaaaaaaaacaaatcaaggatttttaaactatgaattggacagatcaggggtgtattttaaatctctctttttccagtgaagataatactaatgtctccagttaaatgtttgggaaaattaagaatcataaaaaccaatataaatttggagtccttgggagtctatggcactcatacccaagctgaataccagactaatagaagttcaaggaatctaagtttattcctaagtcaaagattactttagacctggcagattctttcaagcaaataacaccatttccactgaatacctttatgcttgaccctcgatctgacatatttggctatgtattaaaagagtaccctaattcttccgcagtaaaaaggggcagcaatgagcaaactgtatggaaagaaaacatcactgtgtcacataataaacacccagcattgattctattttcttgtaacattatcacctttccttgtgaaaaatcacataaattccctgtctcaggatctcagaatacccatccagcaccaggaaatcaatacagtaagatattatttctattgtattttattatattgattatttgatgagatttaacactttaataatataaacaaaaatcataagcagagctattcacagacattggtctctgtgatttttcagtggcactttattatcctcattccattttaaaagcactgtttctgagtttctgaagattgccaactagtataaaagtcaggtcacccacctgctagaaggaaccataatactttaagttatttaaggatgatggcccattttgaagtatcttttctttcattcacaataagttaagctagaatggtttaaacaacaataaaggagatacaatttggctattgaagtcaataagaagctctaacaatgttatcaaataccaacatattactttaatgcaatttcacttcacttttcaaattagaagtagaagttttagtgaatgtgtgtgctttcacagccttcattgtgatttaacctcaaaaatatcattagaactgaaagagtaatggaagtaaaaattacagaatcaaaaaaaggctaaatgatcataataaaattaaattcactgtgggagatttaatgtacacattatacatgtgaacacacatggtattgttcactctttgaaaatcatggttcacattttataaggcaagagaaaatagacttttcaattccttttgtccatttactttagaactttgttcctcaaatgtgtctaatcttaaaaatcagatagtaagatcatagccattcaatttaattccagatcatactctgttgatatgccatattgtaatcccacttattaaaacaagatctatttgaagaaaaattagctctgccttaggaaaacctatctgaagtaaaatggagattgccaccatagtatttgttacacacttccataattggcagacacattcgcatctaggtatcttcctgggttttggatagggttgccatatgcatgatggtcacaaaacttttgcaacccaaaatttatactggaataaatttcttcatggcagaggttataacttatttagttttattcttgtatccttaaaacacagacttttgcataatagcagttcattaaataaattggaaaatgatgcacagaaatgagaaaataaaatacttaaagattatatagatgtcactccctagtgtcatattaaatataggtcctgaagacggagcattctaccctagctgtgtgctggatttgcctaaggagcttttaagcattcctggattcctccaaatggaattgttcctttattgtcccaggcaataaagctccctagtgataggacaagagcagccaagtttgaaagccatggatttgtaggtgaatttcatgtgtttcctcacaaatgatgaattcattttagttttaagctagagaagtacagacacatatagaaaagcacacagtctctgggttctcatttcctaaacaagaacacagagcctaaacagattaaattactggtctaatgataaacatctagaatatgtcaatgctaagattgaaattcagaccttccctgagccagtgttcattattccatacaacactgcatcgtttctgtcatcatcttagaggtatttctgggggaatagaaacaaaagctgcatcaatctataatatgcttctctgctcaggttcaattccaaacacaactttagaaatcaaaggcaaaagagagtgtttcattattttctgttcagtgccaaacataatcctcccgagtactgtgacttgtataatgtaattaggtgacttgatggaaaaataaaaaatttaatatacgatgtgatatacaaccctagatatgcatacaaaactggtataaaactggtttgattttaaattcattggatgttatggttgacaggcaaaatgaatgtcctacagtcctgccatgcctgattgtgtcataatgttaagctctcctacacataattgtcatttggcaaccttaacaatgagaaggacaaccagtcatgttagtagttatctaccataattctgtgtcatttaatagcaaaagaaaggggaaaataattagttgacctgatctttcttagccattaagtagctttcaaattaaaaaaccagagttgaatttttatttcctcttaaggtagactgtttgttcgtaattacaggaatgtctgaatattttctttttgttaaccaatgttttgtaatattttattgtagtaattgcaatttctgtcatcaaaactttcaaataagtatatgacagcaattcattaaactgaaaagctagatgttgaaaattagaaaaaaagaaaattgatttaaagttacattatggaggaaattagttttatatgattgtattgcttttatttgttcagcataattgaatctgaaaaattagttgctcattaagaatattaacctcaaatcaattgttctatttgcattcttttaaatatagtattctccatatggcaaatttatagattcattgttggtatctaattttattcatttgttctggtgtggaaaagtctgggtcaataatgacattaccccatataaatgcaactagattggtatgtaaacccaaaggatgctaaaggaatctgccaaaataaaggtttctgtgtcaatatgtatgctcagtgggaacaagatgaatgagctatattctactaactaagtcaatgtgggcatgatccagtgcttctaagaaagggaattaccctcaggttactgcagaacatttataaatctctgtgacatatttggagatagaatgagcttaataattttctgaaaactggtacatctgaaacacccaaaaagaaccaggctctgatgaagccttttgaagaatcaaagagattgctgtatagcactttgttactattacaatatattgatagccaatagatgaaagaaagcatgaacttgcatctagaaagatcatacttttacaagtatcaaacaattgtttttttctgggtttttttaagctagccttcccaattaacatagaaatagaatctagtgattttcatttccattcattttctttttttattagaaagaaaattattttacatgtcaatcacaggtccctctcccccccctcctcccctgccccccccaactaatgccctacccatcccataccctttctgctccccaggtaaggtgaggccttccataagtgccttcagagtctgtcatattatttgggatagggcctaggccaacccccttgtgtctaggatcagagagtatccctccatgtaggatgggctcctaaagtccattcctatggtagcaataagtactgatgttaacttcaagttcaatcaagaaaattttcttttacttctgcattctgcactttacaaacttgagtatctccccaactcaaattgtgtgtgtgtgtgtgtgtgtgtatgtgtgtgtgtgtgtgtgtttgtgcatgcacgcacgtgcacgtgtgtgcacgcagatggatggatagatggatggacagatggatggatggatggatggatggatggatggatggatggatgatgaatgaatgaatggatatggatatccatatatggatagatcaattttaaatttatttattatatttctcccttaactttcctccatccaatcatcccatataccccatattcctccttgttctctttcaaattcacagcctcttttctcattaattattgttacattcatatatgtatatactttagtattcctaaatacaccctctttagctatataatgttacttgcatgcatgttttcagggctaagcatttgactggatatccacttggtgtgctcttccctgaggaagtctatatctcccattctcaacattccttagttgccttcagttctttgtataaggttgaggctttgtgggctttctcctgcccactttggcatgtctattggtgttatccttgttaggcttatgtagtcatgttggtaagaccttaacattgtgtgcagtttctaacagtgctaggagacacagtcttacagtaagatccctgatcctctgactcttacaaaacacctcttctgcaatgttccctgagctttaggtataggagttgttttatagatgtatccttggaaatggggtcaacaactttgtgtgttgattggttgtggttttctttaatgctctctgtctgttgtaaaccaaaagattccttgatgaggagtgaggaacacaattatgtgggtataaggacaaatattcagactgtaattaggaattaggctgtgttagtaaaatgctggctgtaggtgctcatccaagatccataacttcactagctctggggaattggctaggtttcttgtaccaagtatggttttctttttaccaagtgggtcttgagtctaactggaaagctattgatgaaacctgccaaggtatgcatgacactacttcatccttgcagttattgtgccttgctggtcatttttgtagttcatgggtctcttgactgtcagttgtttctctcctttagaagctttcatgacactttctggtaccatgaaaactagtcctcagagaggaagcattaaagtcaattctagctgagaggcctctaagccatggatctgaagtgcatgatatcctcaacaatagtgactttcacccttgggggtggcaaccagggagagtagcaatattctgttatgtcttgggatcctgtcatacaaacttaaccaacaacccaaaagttgtatctggtgttgggttcttttgttactaagtggtctttggctttttgaagagagcattgtcagctcagatgagaaattttcacttacaccatatttctttatttatacaaactaaaatatacgatttattaggtagattcttaatagcatgcatgattccttatgaccttttcagatgtccttgctattattttaccctcctgtatttatctccctctccttctccaaattaaagaccccccctcttcccaattccctgaatagatcacttgtaccccgctattcccctgttattccacagcctcttaccccagcaatggttcctttctactttcttgcaaccaatacattttttaactggtttgttcattatctgcactgctaatgttccacatctgtaatgcttacataatcccgataaagtcaataggaataattttgagcatgtaaaacctttttaattattttcagtagttccaatattttttgctcttatcaagattgcttatatccattccatggattttcgtggagaatccatcccttattaagccaagagtcttttttcagttagggaacacagtgatctcaggatcactgtctaagtggccacaggcattcattgcaggtgtcaggctgcaacaccatgtgcacaaactgtgtgtgccactcaatagtatgcagagaatgccttgatcctttgcaccagtttcatctaccagctaagacttgtctagagtttcatggtatgatctcgttagttttgcaataggcaacttgtgaacaagaatacatcatgtaagtgccatcgtctttcctgtcattgcaaagcactgacattcacatcagtgcagaccatcaacactcagacaaatcaactggaaaatttccttcctctataattttacattggctcaaaacacagcactaaattacaaactagtagtaacaccactgtgtgatgacatcaagcctttaattgtgctagcctgatcgtgaagtttgcttattcatcaaccagttctatagatgtatgtttatgtatattatatatgttattatatgtcataggtttacatttaatgtttagtgttatgtatgttagtgaaattcacacttaaaacgagcttttattttaactatggaacaatcatgattgtttctgtcatctacccttactcccttttaataaatgttttggtgtggcagtggctttttataaagatttttatgctaaaggatgaatataaatagatatatgagtgaactcttaaatcctgtgctcatggatcaatatctaattatttattatgttcgcctgggatttcttagcaaacaaagctgagattgccacttaaaagtttaaaataaactaacataaatgattagaaagagcaataaatgagctaggtgatagtaggtaaaatcagcaatatttgtctcttgcctttaaaatgtgatattgtattatagtgctttgagttagttttttattgttcataatttctatatcattcattttaaatgcttaaaagaacaggaatgaagttttatctttggaaaaatgaattaaatcatctatttttcagaatagattaattttcaagcattttgcccagaaatgtcttataaatgataaccaggtcctctttaactcattttaactagcatttagatccttttttagtttaataaatgtaaaatagaagtgcttattaaaagttcttcatcatagtaagtttgcatacccttttcctggtaatgacaatctgcctaccttcctgtggctttgccctgttctgcaccacctagtctcttcagcatcctgacccctgtcagccccaggtgtttttaatcagtaatcatggggtgggaagatataaaatatgagacaaattacctccagaaacctttaatttaacagagccagcctacagaagggcacatttccaaataggtgaagagcatttcccccactgagctattttatgagttaccccttgactgtttccagaaaatacttgtgtgggggacagaataggagctcaaaaagaaatagaaagtttttagatggttttcactagggaaaaagtgtaacaattaaaatgtctgatgtgcccaatgttttctatggacagtattagtgtttcatgcggacctgttaattttatcccagcaataatcttatgaataagattatagtgactcttgattttaaatgggtcttggagaagttagggtcccagtggtgagtaagacaaccaaagtgtactttgtattcccagtcatctcaaggaatgaaaaaataccatctatgtcttgtttgctagaaataaaccattttttaaagagagacttttaaaatatttttcatctttccagcctttattaagaactttaaattaatttttatataaaaatagattcattggttttctttattctctactttttatttaaattagaaacaagattggtttacatgttaatcccagttccctctccctcccctcctcccctgccccccataacaccctacctaatccacctatctttctgctccccagggagagtgaagtcttccatggtgggtcttcagagtctgtcatatcctttgggatggggcctaggcccttcccgtgtgtctaggctcagggagtatccctctatgtaaaatgggctcccaaagtccattcctatgctagggataagtactgatttactacaagaggccccatagatttccgaggcctcctcactaacacccacattcatggggtctggatcagttccattctggtttcccagtgatcagtctgcagaccaagagctcccccttgttcaggtcagctgtttctgtgggtttcaccagcctggtcttgacccctttgcttatcactcctccttctctgcaactggattccagttcagttcagtgtttagctgtgggtatctgcttctacttccatcagctgctggatgaaggctctaggagacttctaaaatcttaaatgcccatgcttactcaggctaaggttgcagtcaccattctgtcatacatgccatgtttttacatgtagcccctagaagtcatgatagcctataaactattattaaagcaatctggattgagacagtttccttttatgatttttctgattctgtgatggaaaatgaagagggaagagcacaacagacttggcttctgtaaacctccttctctttctgtgaatcctgagatccatacaaccccactgagtctattgccacatctataacaagagaatattagaatacatatttgtctcatttccaacagacaccagaatttctgtggtttttcctttgatgtatgacaggatagcatatggaagaaactgaaatgttggttggtctcatacactcaaaaataaatagcacagatgtttttgaaaactctttcaaaactcctgagtccataatactccttattactacacaatactacttcttctaggccagtgacatccccagtgtagttggagagttgtcccattgtgttaagtaacaaggttttgaactaggttctgttccatctgagtttataaatgatattaaggaagatctatttgtcaagttgatgacattgatttttacaaagttataaagtattcaaaatttttcaaaggcagaattaacagagtgagttcagcaaattaaaccctgtttgttggtaattaaaaatttacataaacagcataacaaggttcgtttagctggcactgaccaaatatttatcagtgtaaggatgctgtttgaaaaataaagtcttaggcttcacacaggtggattatcctgcaagcagagtgatgtctcaatgatacccccccttcttcccacttgacagaaaaaaaaaaactttgtagatggaagcacacctaaaagtcgctgtcaccaatggcatggaatttccacatgtctacaccaggcctttcctatctgaggtctcagtgactgtggccctccctattgaaagactggatgtgagaaacaaagaaaagtcatactcagtctacataaccatttgttactgccatgaatgaatggggacagaagcaaaccaagtaagtcttgaagaagacaggtgacatacttttggttcttgagagcatctgttaaagccaagtttatccctgagatgaagtttttggcctagttttgagtctgtgtgcctactatcctttgaggacctatgcaacaagtttctctgtatcatgaagggtgataagctagcaaacttcccctcatatcactgaaacaacttcaaagacataagcatcaaatcagcagcttggtcttctcttactttgcattttcatttcaatggtgcagtcctattttctatatatttttccattgatatatacttaaaattcctagtatatctattctctagacaagtttatagtgagttataggatatttagttcactttcatgtaacatcaaaactttattgaaaagcattttggggacaatctgcttgaaactcaaaacaattttactaaaattgggggaaacaattatatctggtttctccactcgtttggcacagtacttgaagtcttagctagagcaatgctacaagaaaaggaaataaaagggacatgaaagaaaattcagattgtaaagttcctgtacaagagacccttgaaataaaaatgccccccataatgagtcacattgatggataaaggtcaacaatctacttgaaactgaacttcacccgcatctgaagtgaatatcttttattctatattacaattacacagtggatgactgtaaccttgatctgaattgataacagattttcctttgtggaagcatgtgacttattggcagctgatgaatggatctttgttactctgttaagagccagctcttttgcaacgaagcaggtcttccttgatgtgcagtgctccctgggcatacaatacataagaacacatagaggaattttatacctagaggagtttggaataagatgcttaaatattaggcagtagcatggcaacaaaaataattcatttcaatcctgttattgcattgttgctggagtgtaacaatttctgctttcaacaattatattaatgtcattgtgattatgcctttcactttccagttgtatagactagtggatctctttagagctagattttattattttcttaaaatatctcaaacaacatgtattctcaatgtgagcagtaagaaatcaattaatggtggaaagaaaggaaactttgtaatgattctatacttttcaaattggcataagatttcaacacttgtttccttcctctaaaaagagtctgtctcctacctctaaattagctcagcagagaattttggcatcacagatcccatttaccttaataaaagctacttaatgaagcttacaaatactgcttagaaactcagtggttcaacgattgtgttctgtgtccttggtctatagataacccttcaaatctttacaaagatgtttcacagctatagtttgcatctcaacaaataattagatttttctttgaagcatggttatgtacatatgctgtaatatccaataattggcaatagtataagttccattaaaatgaagaaacgtgtgtgtgtgtgtgtgtgtgtgtgtgtgtgtgtaccccaaatggttccgtggtactttcatttgctttctgactaactaagctgttttcttaattaatagttgatgtaagaggcccaagtccactatgggcaggtgttggtgggttatacaagagagcaggctgagcaagatacagagagcaagttaataggaagtatttcttccttgtctctacttctggcttcaatgttcctgctttgagttcctgcccttactcccctccaccacaggctgtaatttatatgatggaacaaacttttcttccctccagttggttttgctcatagagtttatcacagcaacagaaagaaaacttaatgtgtcttcaggagcatctcttggtttgcagcaatattttagcaacaattttctatttgcgtattagttaacatcgattatctgattttaatagaaaatgttgaggttcgggggagaaacctgcaatgttttttaccctattagctgttctgaaacccaaatcgtttgcttagaaatagcacatttctccttctagcattttcctgtgacctaattaaattgcctttgtttgcctgtaggaatgtcatttccttgcagtgttccctgtttgaaagatgaagtgtcacattatcttaaagttagtttgatgaggctaaggttatattacctcatgtcacagggctgcactgacattttcagagaaaaaggtaacgtttctgtcattctgataaggaagcagtaccatgaccaaggcccttctagagaagtttttcataaaccacaagttaagaggaaggaaatgtcctgtggacattgcctttgttcagagtcctcactcattcattttcctttcacattattcagccttggcctaattatttcaaatgaagtttagttcctgatcacaatggagttatgtcaccttcgatgacactttatttcttccctgtgtatcttcaaattagcccaaatcccatgactatctgtgatgactatgtctctgttaacaactaaggaaatcaaaacatatggaatgatgcagttgttagtttattgagtgtgaatatgtaaaagcattgcatccataatctttccccatttcaacatccctgccattcttcgatgatatttcatgtctaggtaaactggaggaaaaactcatccttagtattgaagaagccatttttacaaacaaggttttatctgatgcaatgctttgtgttttcttttactgttatctatcttaacactcgttttccagtcaataagtcggtaaattgtttataattagtagaagtagcaggtattccttctgagatgtgtgtttactgtctgagatgattctattatctatgataatttcttctctattttcatacttaggaataaagatcttataaatgcagaatcctagtaaattttcaagattgtcgttgacctgagcgcttcctatttcaatttcataacatgaatttggggctagggggttaagtggaatttcttaccagattagcagcgtctacttgaaatggccctaccttagacatggattctacatctcctgaaaaaatgtcattgtgtatagtcctaagtggaacctcagagtcaaacatttaaagacagtcttcatatggagacaatggaataggcaactggaaaacctcacatctctgtggtggccccaagtaagattgctaatgttaagaatgcttgagtttctgaaggtatgaagtgttttcctccaaagtttctgaaactatgctaggaagagaatctttgtaagtcctcatagataattgctatgcatagcaaaattagagaacacaagttctcagttcaaatctgggcttgcagttgatctcactaaagatccaaggatgggttcgatgtctaaattgtgttactatttgccaaccctaaacaaaattgtaacctgatacacatattttccagtagtaaatacatgttgagtaaactaatgagtctctaagagggtgctttgattttaatatttagttttgttctttatttatgtatatatctgtgtgagtatatgccacatgtatacaggcaccagtatgggccgaagaatatcaagtaccctgaagctggggttatgggaggttgtgaagggtccattataggttctacaactaaactcagggttagaagaaaaggaagcatccttaactgttgactcatatttctagcaaacccaagaggatttctaatgagcatgtgttaattagcaaatgtcacaaattcaggagcatgaataaatgacatgtttataagtgtgcagttttacaggttaccccaaacactaacacattctagctattatctttaagttttcattttcttttgagacagagtctcatgctgtagcaggagctagcttggaatgccacactatatagcccaggttggcttaaaactcatagcaatctttctgcattaccttctccagttctcagtttataggcttgaactaacatatctggctctctcttagttttaatgtttgtatttctcagtgagtattgctgttgccaacattattaataatttattacaaactcagacagccatattatggatacgcttgccttacagccaagatgtatttcacattgacagttctatgtatcatgacccaaagattgttttatgagcctcatatgtgtgtgtatcttccatgagattgattgtaaagatcatttgcgagggaattaaatttcacttttatacctgctatttattgaaaccatagaaaattcttactgggattacaacattgacttgtgctttctactgaagctggcatctgctgattagcttgagcttgtaatgttatacaggcatttgacagagactgcagttcattcatcaatcaggaaatgtaattgttcattcatcagtctggaggtgtacttttaagaatttgttcataagcaagttttaagagaaatattgtatatgtttctgtgaagaatgtgttggacagaaaatcttttatttattttggcaggtaaatatttactatatgctgatcttctggagggttataaatgcaaagagtttggagattttgaaagggcaccatgatatgtaagatctattgacatatttgtttaggaccctctatcactgaaaaatgaataaacgagtaagactcataaatgagagacactcttccaaatatatcactaataattctttttcacattcaatagtgaactatcctaaagtgtgctcattttcctctgtgaaaaaactaaccaaagtcaaagctttagatcacttttcaagactgtgtctttccaccagctgtcaattaatcattctgttcattcctccttgatgttgactaaatcaccaactttttttctttattagcaagagaaaagtaaatctttgaatatgttaatattcttgttattctgcctggtcatttttccccttatagactcatttgaaaacgcagcttacagtacatctttcctaaatgagtaacctgcagacacaggattctgagttcccaaaggtgaaagtgctactacctgcatctcaagtgatggttgtcccaaggagttatcacagaaactctcagataaatctaagtcattcagaatatgccccctgcagtcgagagagtaatgcataatcttaggtttctgagaaattttcagtggatcttttctaaatagttctcttctatttacattttagacatttattgagtaatatgaacaccaataactttgcattaagttaccaatgggacctctgttggctttcctgctctctgtagcatatattctctgtccatttcctgtccttaacaaaggagggctcttccaggcagctgcttctcgatttcagtagcaagactgtaattctcaatgtcgctccacagagataataatagttgcacatattaaggccacaagcatagataagtttaatatttaagaaaatcacctgaaaattgctttatcagattaaaccaaccctccccaatttaatgcgagcatatccctgtagctcacaagaaaccatataaatgacaattaattttcactcactctaggtcatcaactagaaactggtatgaaatgtttcatgtagaccacactcttgaaatcaaatctcttttctttgccttgaaaactttggcttggtgataaatcacattaattatttaccaaggagtctctcttgaagtgcttcggctctcaagtctccttgttgtgcttcctgtcattagacagactcaaaatgctggaaaacacaacttagcttcatctaaaatcatttaaaagttcgttagattaaatatactaagaagtgcctgactaagggaaatggactacaagtagaataatgtagtggagatggaaccattaacttgattcttcttttttaaatctcacttcatttttttttccttgggaggcatatttaattaatatgacaaccaattatttagtgattaattgcatctgaacttttcttcaagttggtcattttgttgactcctttttttaaatcttaatgctgcctcccaatttgttcttgctggaacaaatatttgaaatatttgaaatatttgaaaacaaattattttcacttaataatttaggagctacaagagaaggagggtaataggtgatttaaaaaactactggtccatacattagactgcagataaagccttctgctatgacagagagctgtccaacaaagacctcttcgatcagttacttaatcatcccatttggtaggaagattgatgtaggtggtttagttgccgtgattccatgtaccagctctctaaatcagggctggttagaaacagatctaagagttgagtatcagataagaggctgcaacataaacagaggttttaatcaccatcatttgtctatatttttaagtatattctcctctgccctcctttccttattgaatcctattcattttcttcactcaatgttttcaaaagccaatctcaatctcttccaaggactcctaagaggcaccaccttgatctttcctctgtagcccaaaagtacctggtgcattgctcatataggtttgtactcttggtttgctacacttctgcctccaatagattccaggcattttaatgatgctttcactcatcattgaacactgggtgcccaggccttctctgggatacacttagggaatcactggagaacaaaggcttcttagttctgtgattgacaagttctgtctttaaaccaagctctgatagcacctttccatatcacctttggtatactgtttaataactggaagatttagtggtttgcttagtttgcttactatgtctgtgacaagcaccatgatcaaagcaacttggggagtaaaaggtttatttcagcttatgattcatacttcatcataaaagaaagtcagaaaggaggaaccttgaggcagaaactgagaggtaatgaaagaatcctacttagggatctactccttctagattgctcagtttgctgtcttatacactggagaccacccacagtggactggccctcccatgtcaatcattaattgtgaagaatgttccaccatcttacctacagatccagcacatggaagcactttctcattaaaagttccttcttcttagatggttatacattgtatccagttgacacaaacagaccaacaaacaaaaaactaacaagttctcccccgcttctctttcaatgtaacaagagagatccttgtctttggtgggcattgttactactaaggggtatataaaagtcaatgtccaaaagaaaataataatagaaagactggaaaacagtattgtgttgttgcacatatgtttttcttcaatggtgctgttatttatgttcattttttgagacagtgatggggaagaataaacagaatttatacaaattcccttctttactttttccctgaatttcctaaaactttttgctactgaagcacaagaaggttgtcatggtttccaaagagttatacctatgttgtcttcagtgcagctgggagagtattcccttaccatcagaagagcagctatttcaaattgaagctcactaatcaaattgattagctgcccctgaaaataactttctgaaaaggaacacattccttttttaaaactacttttggcattatctatttctcagtatttggtagagtggaattttattgcttagggacgttcacttcacttgggaaagcaaacttgagaaaaaaaaacaactagggactgtctttattgaagaaaaatggaatgataaaactgttaagaaaaaatggctttaaatgtctcctaaagcagaaagccaagttaaatatttggggagagcttgtaacatctataatctctcagactgaagtttctctgttatatcaggttctaatcttatcatgtagcaatataataaaggcctggtttgaggtgaagcatcttaaacacccagcccacacccttttgggctgggtagggtagccatacccttattggctgggtagggtagctattgagaaacaggactgaagactttgtaacttgttctagttcttcatgtgattacttgctagatgagatgaaagtagctagccttgcttctttcaatcccagaataaatgtgttgattttctaatcacagcctagttctggttatctgattctgaacagtcctagaagcatttagaaaccattttatctgatcccaggcaagtgctccttcccaaaccagaaggaagaaacataagtgaggggaaaacagggagaagaaaggggtatggagggagagaaagcacttgtttctaataatatcagctgtgagcatatctttctatcatgtaaaaatcagtccagttcattctaataaaccaattatcattctaagtatatgagaaagagttgtcgtctgataagaataaaatttgaaagctctaatttaaagtatacttattatttatgcttataataaactttcatgtaatttccataaatattataaaatactaatcatgaaattatagtatagcactttgcatgatgtactactaaattcaaagaaaatgttgctggcaatcatgaaataagcatcaatatttaggtatagtgacctttaaagaattttaaatatgattctttatatatcatctctcatgtatcacatcatttttctttcttttgacttctctcctctccactagatactacccacctaaaatcattcctacttacattctgtttcttccatgaaccccctacttttgcccctttccctccctatagcatttttagccattgtagctattaagatgagaatcttatcatttctatggcattacagataagagatgcttcaagtatgaataactaaacataacttcatatggtccatggtagacaccagtatttttgtgccttcacccctgtaacacaatgaattatacaaatatttctgtttggttgatgctgccatgtctccataaatgttgagtagtagaataaaaagttcggagcatctatttgctccagagacactgggaaatactttgtgaagttgtatgagtgtgtgtgttttactttcacatgctcctagagctcatgtcctgccctccaaccagctgtatgatatgagcaaggcgcatgtgtgttgccctccaaccagctgtgtgatgagagaaaggcatgtgtgtatcctgagctttagagatctgagagatcaaaaagataacaagtacgtgtagatacttcacctgtgttgtaaagaggacatttttgttttcctgaagaaatgtgaagagtatgctgtgattgcgtctaaatgaccagtgtagaactgtaagctctcaatatgcaactgttgggccatgcataagcctggatgctgatggagagcaggtgaacataggtcttctcagtgattctagatgatgttgagagtctaaactgctttagaaactgcctgaaaggccttatgcccaatttaaaattaaaagctgacttgaatatatagttttcagtttctgaccacactttctcctttgtcctctctgtttccttccgttctgtatatttccactgaaaggaatatatcttgataaaggcatacttggagcatttgaaacacttgcttcttaatttcttaacttttaaataaaaactaccaagacctatcctgcagatttgttttctcatattgcctggctattcataagttataaggatggcatgctttaatcatccccaacaatatgaaacatcttgaaagctgtgagaattaatgaaatgagactttcatttccaaactatgtaactttttaaaggaatttttaccaaaatacattgagccctggacaacttggttacagcaaagagttaatcttgccaaaaataattggcaaattcaaaatgttctctttgaatagagaggctgtgatctaatgagggtcttcttggggatatgcacaaaaccagccaggctaactgctctgtaaaagaagagcatatgtaggcttggttgaattaatcataaaagttattagtggttaatgccaatgatttgatgatagaaatgtgggagtttttgcaaacactattgccatttgaaacaataactagataagccagaaaagaatcagtaaagaagccatagtgatggagtggttccttgaatcttaacagtcttcagcatcagattttggacagatcaacgaagttaagttgatgagagcagaaggagcaatacaatgagaactggaaagcaccacatgtacacaagggatgtgccctctgtacgctctaacatgcagaagcatcacaaataagggaagagaagcgaactgtctccattgattttccttggctcctcatattccttactaatgcaccagacgatgtaaataatgcatacagcagattgcactagagacaattgtctccttattacatgcataagtcaaaaggcattattagtgcactagagacaaagactccattccagattgcatagtctctttgcctaatgaatgtcgcagagaggaaacacaagtacccaaacaagcaaacaggacaatctttgtagtttgcctcatgaaataccttcttttgtatcataaaaataaaaaaagatagtttatggagcaaatgaaacatatcaggagaaacttttactaagcagagaaaacactcaaagtctttatggaggaatattgcattgtcttctgtgataacatctgagatgcgtaattgctatttctttttaagtataggcaaggctgttccaaacaagctaatgttacatgccccctgtgactgcctcaatagtttctatagtactggtaaaacctatacgtcttaacctattattgtatctttcattgcatgatcacacatttatatatgctctgtaggatgtttgttcacttgaatctttttaagtattcaattagtatatcttgattatacttaataatggtttcattgtgacatttacttaataatgggtttcattatgacactttgatacctgcatataatgtatatttatcatattcatttcttgttaacttctcatctccctccccctcctgctcatcgccttcatcttctcctcttgtccctgtctaccttcatgacttttttatgtgacctcatgagttttcttaggttgatttccataagcattggtgagagggtttttacaggtgcatggacatctcatcagtggctacactgctttaaaaaacaaacaaacaaacaaacaaaaaatccttcccccagaaaccattaactgcatgtaaatctttaggaggaggtggggcttcatgaattcctcttccctctaacatttgaatttattcttctaatagaatcatcatcggcctcatactttgactttatcacaacagaggccactaatccctatatcatgtgcttctccaggcctttgtctctggcggctgtctatggtatgttcagtatttattttagtgggtgcattgtgttcttcccatctcctctgagtgaggtctgtttaatagcagagaacacttatgacttttcagttcaggggatttgatgagcactataaataggaaatttattccctagatgttcaatgaaagtcaagctagttctaatactgtataagaaaaagcaaactgttgattaagtaggaacatacttctttttaaaacctctattctggcttggcatgtccagtacttaggcagccatcgctataagttcaaggccagcctagtctacatagtaatttccatgtcacccaaagggtgcatagttccttatctcaagaaagaaaaacaaaaatatcaccaccaacaaaaaaaaaaccctttcctcaattctgtattcttactgtcgctttaacagtttgattggaactgatacagtttgagtataaaaaaaaaaaaactttcagtttaaaatagttgtagatactgcaaaggaatcacatgggctgcttgctcctaagccccaagtttctgccaggtaatgtcccatgccactgtataatataatacactaagctactatgtctatcagggttacgataagtgataagtgaatcaatattgatatgttgttgttagctgaagtccagttctgacatttaaatttgtgtgtgtgtgtgtgtgtgtgtgtgtgtgtgtgtgtgtgtgtattagatggaaaacaaatgttttcaatataattaaatatttgtttcttaaaatttaaatgaagaccaattagaatgcatatgcaataagaatcacattccctatcaatttacatgaggttgtctgtgactatagatataacacagtgctgagagcacttgctactctttcagagaacctggttttggttcccagcacccacttggtagctcacaaccatctgtaactctagttccaaaggttctaactccttctgtcttatgaactctctggacattgcatgcagatgggtgtacatacctacagacaagcaaaacactcatattaataaaataaaaataattttaaggatattttaaataataaaatgagtttggaaggactggggagatgtttcattagtaaagtgcttgccatacaagcaagagaatctgagataagaattctaacactcagtcccagcattgttagaatggggtgggagacagaaggatccttcaagtttgatagcagtctagcacaatctataagcaacaagcttagtgagagattatgcctgaaaaaataagatggaaaacaattgaaggaaatacctagtgtcacacacacacacacacacacacacacacacacacaaatacattcatacctaaaaatgaaaggaagtatgtgatccgctagaaacagaccgtagtaaataacattgttgatgtccttgtgtcttatttcacttcactgacgtatttacttagattttaaagtatcacacatctaaaggaaattctgcaagaaacatcatgctagaaggtcttgaacatcaagttatcttctgattggatttttgacaaagttagcattatcttgccattcaattgtctgaggacttactgtgcgtcggatgatttacaaaggttcttgacccacattatctttgatgatatccacagcctgcagagtttacacatgcattctacatgcaagaaatgaactcagtgaaacgaacttctagagccactcagactggaaatgacagctataaaggaaggggaaggaaaggaagagaaggagagcaatgaagggtaaatacggaccaagaagagggagagaaaaaaggggtagagtagaggaaaagaggaaggaagggaaggaggggaaggaaggagagaggggagagaaaggaatggaacagaggaagaaagaattctaggagaaataatcttccagatgagagtatttttataaacctttacatttataacagaagactttctatttgaattctaatcttgattagcagaatggagtgttttgttttctttgcattatgtaaagaaggaggattggtttttaagttgtcattttagacagctgggttactttttaaatagttttacccacagattcatcaaaaaagtgataaacgacctgttttagtatcaaaacctgttacgaagtgtaaaaaccctgatgagcagtacatagaatgtaccctttatttttccaagagataaagagggcagttatttgtaaagaggttaagatttttgaaattagttcaaactgaatgttctatattaggtgcctgaagatgaattacatattcttatgttatgaaactggtctatactggtgaagttctactaacaaaaatttctaagaaagaatagtggagtccctgttgttttaggcatagggttgggggagttgcacaaggcagagacaatatttgggacatgtcctatgctcctgaccctgaattcctttcttgattggagagtgacaaaataaatataattgagggcactgtctggaaatgtatcaccactctgtgatgacaatcatttttctgtctgattgtcatagctggagtctcttgaatactgggactccaacagactgctgttgtctaattttgaaagtacaaggaacaattcagatttagcaaggttacttttagttttctattttctctgagccttctggggatagaacctaggacctcctacatgctggtcagccactgtgccactgagctacattcccccgagaggccaggctacctttaaacgtgagcattatacttggtataacatcaccagggaatgttatcgcttagaagtaagcctcaaaactgaagcatacgctgagctttactctgcatgtgtttctccactgtttttggatccagagtcactcacatcttcatcaggagacatgtaacctgagacttcatgtttcaccctaaacttcatagtggcattaagatttggtggacagagctatggcaccagagacaagtgttactttgtctgttgctattgctctttccatgtcccaaattgaaaaggcacatatataatagcagtaatttgtgtttgtggtgacagaagaagaaacacaattttaaatattttcattcaaatggcagaagttagccatagctattctgctctttctttgaagatataccttgagctctacaggtattacacatgaagatagttaggctgatgcccagtgtgggagagaggagccaattctcagtgctcaaactgcttcaccaaagctgagacatggcgctggacctttccagccaagacgctctgcctctctggataattttctcactacgcatgggcttatttccagccagcactcacactgctagtgcagctttgcacatcaagagcatttggggagagcacacagcccagtggggttttatttagcacaatacatcttcctgaaggacaagctgaggacttaaggttgcaagattcagggagatgtggtgccctactgtcatgaagtaatccatgttaaactttttcaggactggcaaacacaaggccctgcgtttgaagcagaaaagtctttagggttttttgtttttttgtttttttttttactctgaactcttgcttttttgcttgtatacagcatagctgtcagaggattttctgctcatccatggaaaaatgacagtggctcctaatgtagagaaggaacatgccgtttaaatagggagttgagccatgttttgtccttaaaaaaaaaatacttcactcaagttggaaaatatacttgagcactcttgtttcttcctgtgacatagtgtcttaaaattccttttatagctattatcataattaattgaataagatatcagttttatctggagtcttttttgaatagaatgctgtatagtataaagagtgtgtgtgtgtgtgtgtgtgtgtgtgtgtgtgtgtgtgtgtgtttgtgtgttactcagtattgaactcagggctttgcacatgctagataagcttattaccagtgagcccactgagctacattcccaggacttttcagttttccattttaatagatctcattaattacctatgcttgtcttgacttcaatatgtagcccaggctgaccacaacttcaaattgtcctttctctgccctctgtctgagtagctgggttcatggttgcacaacattgacttagttctttaatatgatcaatgagggttttctggcttcattgtcctttctgaggtatgatttactatatgcagagcacatgaaaaaaataatttcatttctttctccatattgcttcaaaaacaaatgtagttttgtaagattatctttaagtgaacttttctattaaggaaacttcaaataacaaatgtctttcaatgtccctctgccctacaccgagaaacccaaggaaacaaactcccagacaaatatgaaaattcttacaatattatagcatgttggtttcatacttgtctctccacacactgggaggaaagtgataattgcaaggtgtcaactgtgctataaaagtaggaatcattagtggcataattctaatggccaggggtagtatggaattggtattatttaagaaagtaggagataacaggtagtgaggtgatattactgggtgtgaggttaaaagattaacaataaatgcagacagaaatctcaagcacaaatgtatgagaaagatgcccttatgcatggaagagaaaccccatgtcagaaaatgtggggtcgcttgccatgtactctgcttctaaatgggtgagcaagatttaaggcttcagaaacttacccaagctatggtcatgtggcttcgggaaaatgacatcatttctctgtctttatttccttagttgttaagttttctaaatttgtgctgccttgatttgattgtgtgagtactaaatgaaataatgcatccaaagtgctcccagcactgttggacacacagcaatctagtgttgcaagggagtttagtttattgacactccaatgtccttgattggcaactactcatctaaagctccagaatacatgaataatttaaatatgatgatgtaaaaactaacactccaatgcttacccacccaagctaagtggagacacaagatataattatattgccctacagaagatagaatgtgtatgtattgtctcattgctggcacaaattatcacttaagccatcaagagtttgcactggtaaattactgcataagtgtaacattaaaaataaaaacccagagacagatattggggttcaagcttcaagctgaagatcagaaaagcaaagcatttaagccctagagatttctcacctctaccaatgctcagatcaaaaggcaattgtgatttctgattgcatctccaaactgtactgctcctcaaactgcaattcctaaactgctgcctctcctcaacatggctggagaataaatcttcacatcaggtccttggctttttccttttatacctctctccacctagccatatcactgctgtctccacctccctagagctgtgattgaaggcttatgaccccaagtgctgaaatcaccttttgtgtgagctgtttttcttttaggactgcatcaatttcatgtagctcagtgtggccttgaactaacagagatccatctgcttgtgtcttgagtcctgggtgttaaggtgtgtgccaccatcacttggctctatggctagttattatggcagctgggattaaaggtgtgtatcaccattgattgcctggcttcatggcttgtggctagctttgctttctgtagcaagctttaataaatcataagtaatatatcaccacacataagtcttttttaaaggattttatggacaaaaggatccctgattcctctggaagtagactggttcagatagcctttcaaaattaatatgtgaggtgtcataacagattggggggaagaataactccattttaaaaaagtcactgtacttcacccttatttaaactacctccattatagtgccaatacagctttggatctagtagattaccatagaaatgggaccaccaaagcctaggaaccatagtttgacaaaactgtatgtgaatgcccactattgatatgtgtgtaaataccttacagttgagaacaagtcactaatccttccctagcagaagttctgtcgttaagaggctcaggtttaaatttggctgcattctttgttgtcatgtatggtttaaaagtttattttagagtcactgcatttgatttcttcaactacaccattgagataacagtcatttaagtaattatagttgctgtgtttatagagtgtacaaaccagatctgtagaaatcatttaatagcgttagctgctgttgataaaattactaaaagaaccatatttactttcacttttagaaaacagtctgttgaaagaattatgaatttatagacaaaaatatgctacattgctgggagactaactcctaattcccaaggagtccaatgacttgggttcgacatgtgaagtctggacaatgaagaaactatgaccacctctttcaaataagtggctctagatagcttgagtcatttttttatttatgtttaaatagtttgcagttttacaatcctattttttccttaagtttctaataataattataattgccagtttgttcccttacctcactccctttctataccccaactttcccaccagtaatcattacctacttgattcatagctttaatattagaatcataagcagtataggcaagcaaaaaaggaagttttctaactaggcatacctgtagatagaacagtgtgcctgcagatagaatagtttaactagttggtagcttttgctgttacagcatcatgccaagtaaaagaaagttttgactctaatggttaatgtttaactctggtgaaatctaagttctcacaatcaactcatcagccaaggctgaatcaattcattcttcattctatggtattctatcacctatgggggatataccaggttttttcatcctataaaccatataatttaaaaccttattctcaatatttggcacttcttatcccttattctcatggccttctgtagggaaacatcctagcgtcgcccaatagtcctgggacaggtaccaggtggacccgggactcgcccataagggcgtggtgaaggaaagccagggtgacataagggaagcttcttaaaggctgcacgtggagaccctagcccttctttctggccgggctagctgggttcctgtgacctcgctctggcctgcatcttgccctggtgctttcttgaataaagaaatcttaccatcacggactaattcatccttgagcgcacgctgcaaccattaatcttcagccttctcctttcaagttcctacaatataggcacaaccactagaaatgagggcactgtggatttctatgactctgcttcattccctgttcctagactgttcccattaaccctgtatatcatctacttattagcatttctccaagactcttgtggttaaactcattctttccagaacagttatgcaaatgtgttacatcatcatggacttctgtgactcttacaggctagtcacaaggtgtgttggaaagacaacatcctattcttgcaaagcctgaattcatggtcagacctgaaacataacaagatttaggaactgaatcagattcactgttatatttttaatagtatgtcctctggctcacccaggggagagtcatcaggggggagttttccctatctaaaagccattccatctatagctctaagaaagtgaaactagagtcatccagcaataatttgtataaagggaaacaagaagagcaggtagcatgtaggttcctgaggtcatacccagaattatgcagtgaactatccaccagtcttgccaaaattgggataaattctccattgccttgccataaggagaacttttttgtgctattctcagcccttgtcccatgaagaagtagtcacatggctcccagcactatatttaatcttgaatgtgttccaatctggtgaaattaaaatacttgttctgaatactgccttccattgttctgagaatctaatacatacgaggctgctggtgaaagcggatcagaatgtccaagtgtcatggagccataaagtgatgctgatgtctgacataaaatggacttgaggaagagacaggagggggcatttcctatgagggtgttgtcgttgttaggagcaatggaaggagacattggtgacaagaactagaaatgtttttccaagcaaaagaatagcataaaatcatttgtgactatcatatttgaacacacaaaattaatttcttcaaaaagccaatttgctttatggatggcctccattttttttacttttgtatgtttctaaatgaagcatattcttccaacctttcctgacagcccttccaaccggaaatcctcagctatgtcagaaatcgttatttcagtcacaactcggctatgtgatattgtatatttagcttgagtctttcgatccatgcaaaagctgaaatattaaagtgctttatggatcattcttgtggtgtagtcaaggggaatcatgttagaagagtaaatggctttctgcacttgacagaacacactggagagatttacaacagagcagaagaattcccctcttgggtccacacctggccagtgagttggagtcaggaaataatgtggtatttaatgctaaagggcaccttagacctcctgagggcaacacctctgtttatacatgaaaaaagaggaatcacaccatgcgctagaattttagcctcacaagagggcttctgcaatatcataatcagccaggattgtattagaagtcagtttgggagctctgatccttgagtctactgaaactcaagtctggggccagttgactattttaattaaccctccaattgactcttacgaggactatagcttaagaaaatttacactgcattttaattattgcaatacctaactcccaggatgttttttacacaacactacagtaagcctcttttctttcaatcaaggtctttctctatgattgacgggggtaaaaatctgctgtggatccaactgtatccccatgcaagaagtctagtgagaaataattcaagctacagtccaaaagacattttagcgtgacccgaaaatttgaaggtgaaggcaatgttctttcagagtgtaggtaattgtcttacttcttatgtacaaccctaacattcccaactgcatccgataattatctcccttcttgaattcgcaaaacactcatgcgtgtagaacccattcatatgtatgcttctagtctcatagtatgtagaaaacaccctaccggcgtgattaaatgagtcactcctatacatctttacctgtcccacatctatattgataaacaaattcaaagactggcaaacatccctgaaaagattcccctaccgaggatataccaatacatccttaactactctgtaattttatgcatattgctttaaattctggatgtttttttttaaatgcaagtatggaagaaataagaattaatacatattgtatttaatcactaaaagcagattgctattattgaactctgaataatatgtaaattgtccctttgattggcttaaatcggtttacttcagttcatcataattctctcataaaattattgtaattgtccctttgcaaacaaatcaggtacacatttctaatcagtgaatgcctgaagattcaatgagagttcttactaggaatcatgggctaataaatcttatacatagagcatttctacaaactggggcctcattttgagctggtaaaaatctgccctacactttggccagggagcattctctgtcaatggacagtatgctgcacaagttgaattgggtagcagcctttctgtttatgctcaatgaacattgaaccaaaatgagtacctgtgtcagttttagagtagatagaaactgtttctgtgtaagcgccttgacagttgccagtggtttgggcttaacattagcatgggctgtcagtcactgctttggcattttagatttgctttctcttcaatagagagagacaagaagcacttagcagcttaccataatattaggcagtggaatgtgcactcacactcttatgtaaatttctaaatgcttctagaagaaaagaaaaaaaaatcacctttactcccagtcaattctggctccagatattaaaaacaagaaagcaaacaaaactgttcagttaaaaatcttgaaaagaaaggatcttgactcagagctgaagtcaatgccaaatactaatatctctgatttgatttgtgtgtggcttatgtctctgaggccgggaatgacaacatgatttacatcttcattttactagaaggatttttttcatcactgaaggagaaaaaggatgcagttgtaaatattacctagttaaagtgggcttagatgttttaactaattttagaatccctgggggaaatttccatcattagcgtggtctttttgttagcattttaagagttggtgtactgcaagcaatgcttttaaatcaaccagtctcctcagtggaaaggaaattacgaaggagaagcagccacatagatctctaaataagggcagtaatgggaccactcagcagtcaaccaaattccatgagtcaacatacacatccagttggtttatggtttttgaagcattgcttcttttatggatttactgttcagtttttatctagcaaatgctcacccttaccccaatttcctgaactatgaaaactcaattagacctagtgcgtgcttctgagaatgaggttccttaagcttctaggatgcatacctcactttagaacgtgaacacatcagcagcacattttgaccaggagctgcaaggcaagaataaaagaagctcttgcccacacctatttacgttcggataacaataatgagcccaggagctccagagatatggatacctaactgcctgctgtgtgacacttttcctggagaaacagaaacaagtttcatcccagataggggaccaatgacagaccaaagtacagataccaccaaagccctacttgctgaaagagtgagctatatcaaggttttttacaagttatgggtgagacataactggaacagaaacgactcagaacaacggcatcgccaaagcccaccccagaatgagtaacagcttgttaaagctgtaaaaaccttgagcaaatatcacaccctgaaggcagctcaacaggttgtagtgtcctttgcaggtggctccattggtctgagcctcttcaggcagcctcgaagctctgtttcgttcaggcagttctttgctccatctaggcaagtaggttggagctgtttggtggtggctgcttctctgcagcaactgggcttctctaagagtctccctgtccagcttcgaaatgagggcttttgccttgtcttattgtatggctcttgttctgccctgtttggctgtcatctcttggaggcctgctcttttctgacgggaaactgtgtgggagtggggatgggagaggggcgaagacgtggagggagggcaactgtcgtgcagatgtatggtgagaaagaatctactctgaattttaaataacaaatcttctctgcaacttggcttgtctgtgagtgactttccagtcttttctgtttctttactcctgggactgagaagagcctagagaatctatctggtcactttcagacccatccagaacctattctgtgttatttcctgtcttaatgagcctccctacaggatagaatgttcctcccagagaaaactgccacacactactacagcactcttcctttgataacgacagacaagcagctggctatgctttgcaacttgctggtttcagttttcaccttgcagaagttcttctcattttaaattaagttgttgaaagatttgccttgtttgtttgcatttaaagaaatgcctaagtccagagaaaggatgagagggtcatgtgacaccagggcaggttctcctgtttatctttggtggattaaagcatgtgggtaacaactaagaatccaagtagtggtggagaaaatgccattgatgcccttcccctataataagattggtgtctaccttggttaccattcctagagccttcaaccagtagctgttcgaggcagaaacaggcacccacagctaagcactgaactaactactggaattcagttgtggagagggaggagggatgagcaaaggagccaagacggggctggagagacctacagaaacagttgacctgacctagtgagagcacagaaaccctaatcataaagctcggaaacagtattggaccgaaccaagccctctgaatgtaggtgccaggtaggaggccagggcagtctatgggacctctaacagtggagcctgtcttcaaccctagggcaaaaatggactttgggagcccattccctatgggaggatactattgcagcccagatacagcaaggagggcctgggccctcccgcaaacgatatgacagactttgaagatccctggtggagggtctcactgtccctggggaggggttggggaatgggttgggggttggtggggaacatgggaggatgggagggtgagggaatggagggttggatatgtaaatatgagtggtaaataaagaatttaaataaaaaaagaaaaagaagtatatgggtaaaataacgagaatagttttcaaaacaagcttatactgtatgtgaaatgtcccccaagtacatttatttataaggtggaacctttgttttccattttagacactagatgatatattagtaagatacatttttaaattattacaacaaaagaaaatactaaacaatggcttgaaaaaaatctaaccaatatcatataatatcctttttctcaaaaggcacattccctgggctggatgtggtggagaccagctacttttaaaatagcagataaggaactttgatgggtgattttctgagacacgtattatttttgtctttaacaagaaatcagaatactttctcatttacttatgagatcacttttataggactgtcagccacaaaatacagaagttaatcaggatcaaatctattatatttgtttaactcttgggaaaggatttcagcctgtaatgatggagctggaaagatttatattcagttgaaattagatttgatttctcctttacatgataatgtaaatagagtatataactgttacatataaaattatttttatacataaaatattgctataaagggaaatacatagaagatatctcaacagtaagttgttttgtccgcagatcattcatgaagtcagatctgctttacttaagagaagaattcaaacccaaaagactacagtataacatgtacagtttataaagtcagaaaattcaaattctgccttcgtggtgatgtttactatgtgagcttagcatcatcatggccttctcttctctgcctctcccattgaaggtggccttcaaactacagactcccattcatttctccttttaccctaagcatggagaactccttataactcctgtcttcctttctaacaagatgtttccacagtacctacttttagccatctgtatctgacttttccatatctaccaccagatactccatccagggtagcagttagtaccctcttaattcagcctttattagtcagatggagacattagaaagaaaagtcaaccacatatcaccaaaccttaatgatcacttaaaactcttccagagtcttcaccctgtatgaattacatctaccagaggacctgagagtcagctttctgtccccatcctcacccccatctaccacctaacattctcttagctaatttttgctcttccataataaaactctgcttcttgttccaggcctcaggcatttgcaagaaatatttctatcaccatgaattttggggtccatctcataagtaccatctcatcatttatcattcagtttttgtttaaattttttggcttcaaagaatcatacttaactgtcatttgtaaaatattctctacttaaacccattactctttaacatataatctgttttatgaaccttattaataaataaaatcactttgtcttccttgctactaacttaatagttttaattagtaatttgaaaaaataaattctgagacagagatttgatcagcattgcttaggctacatttacagcatgctgatgatgctcaacacctatttggcattgattttcttgtgaaagttatggatagtgttagtacattcccatcagtaagacctgtgtggtgtgtgtgtgtgtgtgtgtgtgtgtgtgtgtgtttgtgtgtgtgtgtgtgtgtgtgtgtgtttccttaatagctgttaattgtgatggtgggtacaagtttgatcattagtggtggcactgggaatctctcagcaaagggaacaccatcccccatccaaagggaaaccaaatatgcatattcaataaagaagagccagatcaaaagaaatgcagattggtctggtaaatgaattggattgataactttggctttaccagtaatgagaaatgctgcaaagggtatattgtgaatcctgggcttcagtggcttaaattttcatgtgcaaatgtcaagataatttagaaataattataggaaatgtgctaactgaagcagaaaatcatcttaatgtaggtaagatgaattatccaccaggcgcctgtaggcttacctgcctggtattctggagaatagacaggattttgcagtggaaccttcctagttcatgggattaacccatattatttaatggtgtggcatattgtgtaacgtttacagacgctttcttccactcttttgtttgagatgagaatcttgtttagttaagactttgaaaaatttcttgatgggttctaaattacggtcagaataagagctagaattcctgagagtatgccccatccctaattcgagcatttaattggacatttgtagtcaaattacttccacttgcttcttttttttaactctaaagtacatttccacgtatttgaggagaattaattagtttctattaattaatttgtttccgttacggctttaatatctctgttgtacctctggtaattcactgtaatggtgtggacctcatttgccaaatgcaatacaatagccttttgtttgaatggagttcttctttgatgttagtcaattaactaaagcaatttttaaatgtctacctggtaagatgcattgtaccaaggcctggtaggtactcccaagagtggtcaactaggcctctctattcaaaactttgaaatgtgtgtgggaagaaaaaaattaacttaaaactgtcaaaagcattcacttaatacgcaattaagattctataataagtaatctgaatagaaaattataggcagagtcctatgacagttcaccataggctcattctcatcatgtttataccatttatttggatgactctctgatgtttatcattcttcaagatacctactcttagttattaacatttactgagtgtttagttggggaaaaggaaaagaaagaggaaaggaggaaagaacaaattgctggcgagtgcatgctaaactgctgttgtctatgtccaaatgtctctcattcagtgttaatgactcttgcaaaatggacttacctgcatttcataactgagaaatccagacttagagggccaaagagcttgttccaaacagctcattaggaaatgcttgagacaaactctttttccctttcccaggctttctctgcagtgtcatatggttactagtgtcatacagttttgaaatctataacagcaattaatacaagagagattaatgtaaagattcacaaaagatttgattagctcccacttctttctttctttctttctttctttctttctttctttctttctttctttttgccgtttactcaaaggagcttaaaattcacatgctggaatgggtctcattagaaaaaggtatggtaattgctcagccctcttcagacagcttccttttgtagcagtgggaacaaatacagagacccacagccaggcattatgcagagagtgagaccttggtaaaacagctctagatggaatgtctccatcaaatccctcctcttggtgctcaaggaatttcttagaatgaaagacaaaaagagtataagagtcagaggtgatagaggacaccaaagaaacaaggccctccaaatcaacatgatcagcactcacatggactcatagaaactgaggcagcatgcacagaccctgcacagatctgtaccaggtcctctgcgtatatattaaggcttccagtttagtgttttaatgggattcctgagtgtgagatcaagtgggggctctgattcttgtgccttttcctggacatttttccatttgcttgtcttgcctacctctagtatcttagtttttgttttatcttattatactttattattgaaaaaaagaaaaatgcatgataaaatgagtagccaaatgtcctttggctggacttacgatcttcccaaaagatgcataagcttgccatttgatccgtattttgtgtgtgactactctgccattataatttgaattctcccttcaaaagacaccctatccaaaaataaataaataaatgaagttgtaagaggttagagtgaaatcatgcttctttcttttattcataacatgataaaatgaaaagctatttcttgcaagaaaaatctcttccctttttgacattagcatagcccacgttcacagagaatttttaagttagtagtttacttcatccactcaagcctaaactaaccacttttgttttaatataacttccaatggcttacaatcacttaagcaagttttataatacctgtatcttgtacaaatttgcctattttctggggactcctgtttagccatttattacatgtgcgaggaaatatgcagataattcagttccagtgtacatttaaaaaagcacccaatgtttattagagatgcagaaaaggccattttaatataaatatgtcttctgaacatgatgtagccattgcacttatgaacacatggtagctgggattgcctttgcaagacctactcaaggttgggcctgtcagtgttttaccttggataggaagaggttcataaggcaccactattgcctgagggatactggcagtgaatagttgttggcccagggactgtcagtttcttcagtagtgtagccacagttgtccttgctccatctaataagtactctcccatccatgctcaagcaacaaattctaaactcagtgggtcatggacacacagagacaaaaaaacatgagggagagtaattgagaagaaggattccaaaaggagcaagagagtgagagtgggcaattcattatataagtgtatgatactgttgcattataaaatatatatgctatttttacactttctttttagtcagtgtgtctttcatatcaggcatcttgatcccattcattttcccatccctttgtgtctgtcctctgcccctgcaacacctgccccataaaaaattttaagagaaaaaagaaataattaaaaatctcatcatgacagctgcagtgtccatatatctttacttgcaagtgtttcttgcaaagagtgattggtctggtttgaggcctctggtttctactattctatagatgctgggccctcactgagacccttcttggatatcctgttgttgccctgtgtcatgtatatcctgcagtttggggtctgcaggtcaggccctctcatgtgctccagcagatcatagacggggtagatgttgggatggaccaactcacaaccctggttctagacgtgggcagcagcaaaacctactatttttatgaattttttattaattcatacttcttctgaaatctcgctttaaaaagatatcccaggcctcttctgtgttccctgataagcatcattgctaagaatattatgctgtcatctcatttttgtcaactaagaaatgtaggagttggtacctcattggaagatttctgtaattcaaatacaaagatcataagcttcatttccagaaagaaaaactaaaggatcaaatcgcagacaaggaactaatccacagcagagctgtggtgcataccaacagtgatcattccttcaggtgtgctgcatagttggagagaattaatgaccattttaagatgatgaattcttgctctatctcacaattgcaggcctttatttgaaaggaagtagaaactactgggaattgctacagagtctatgtgtttaaagtagtccttaccttatggtgaattataaattatggaaactttggagcacctttgcagaaaaggaattccaatgtgaatattcatataggacacataatactctcatgtttccttagtattgagtaatctatggttttagattgctaggatgttctcattcagaagatttacacatggggtgttgctgtctaaatgccaatcagttagcagcatggtatagtagcaaaggttgtaaagtaagtttggtctgcaatgtctgattctagaaacttccatttcaacatgaacaggtttcatgatattgatgagccttggaaatttctctatttccagtaatgatcttcagggtttatttgagagaaaatagactaagagtacccacactggttcagcacctttcgaaactatataaaatatatgtggactcaagaattttctgaatactcactctgttgatttgtatatggttattttacacctctaatttccccaaggcaatcagttatctagaagtcaaacacaaaatgaccagaaaagtgatcattggatatatctttgggggtctgcttcctttcaaacttctcaaagattagaatataatgatatatagcataggcactgtctctacaatgaacattttctcctcagttcttggtcttaatgcaccttataaaaacactatcatcctctcttttgatttgatcctaccaatgtcatccttcccctgggtcaaaaaatcacctttaattttcccttctagatttcaaaatttaaatgtaataatcacttaccatttaaaatacaattccctgagtcccaactctggatagaataatttagtttctggagtagtaactaagtattagcatcttaacaataatctgaaatgattggaagtgagaatgagaatcctttgtggcaccattccttggttttacccagagaatttatagtcaaagcgttctctcttaaatgaagtttttatgtttatttttaaagtagtgctttggttgttttctacactatattttgattatatccgtgcctttccaccaactcttcctagatccatcctccttcactaaccacacaatatcgcatccttgtgtctatgttaattttctattactatgaagaaagacaccatgaccaagacaacttataaaagaaaacatttcattacaggcttgcttacagtttcaaagggtgagcccatcagcatcatggtcaggatcatggcaatagacatgcaggcaaagtatgggaacagtctctgagagccatcttatccataagcaggagacaggaagcatgaaactgggtttggtgtgggttttgaaacctcaaaacccatacccatcgacagacccaataaagccacacctcctaatccttcctaaatagtctaccaattggcaaccaacaattcatataataatctatggggactattctcattttaaccagtacaacttgtaatatttttaactagccaagataaatttatgctgcccaaatattcttggatgagtgatcttccactggagcatggtcaacttaccaggggctacactcttagagaaaagtgtctttccatatctcaagagctaataattgccaataactaaatggctaaagacatgattgcatgtcttctccattctgggatttggtctgttttgggcttgcacagattttgattatgctgttaaaactgctgtgagttcatatgtatagcttccctgctgtgtcagaagatactgtttccttgtagacatctaaaacctctgcctcctacactttttctgccccatcttctgcaatcatctccaatgtcccaaggtgagtgagatatatatagatatagatatagatatatatttcctttagggctgaaaattatatagtttcttactgtcttggctatttgtgggtctctgtgttaatcaccttctactgcaaatagaaacttctcaggtgagggctaagagatgcattgatctctgcatataatgttgaggcattaggaatctactaccatagtagtagattctccattattggtcttttcattttcagaaggaatatatacatatatattcatatatgtatgtattatataatttaataatatcctctttaaaaaatacaatcatatttcaaatgaacatctattcactgtttagttgagttgtgtcaatctgtggttggaaatttcaggtcaaaacttctgtaacacttattccttaaaaagtttcttcaacatgtcacagaaaacaccagctggactaactagagagagactgcattttctgtcatgggataacaaatttattagaagttactaacaatcacccttgatagtaaccaaggaacatacttacttcatttgttatcagtgacactatgaacttttgtatgtatgaggggttttatggtgttttgtggataggatgctaaatggatattcatttcttaaggagtcctatcaactctccagtcaactgctaagatattttgcctagctgatgtggagctaccttcttttagctactgctgactaatgatgcagggaaagaaaaaaagaaattttgcttttaatgtaagtcaactcccatagaaaaggactcgggtaacctggggggttgggagggggaactgtgtcccaacatccaccaaaaagagcaatgtaatgctttgtttcctgggctttgtagtgctatgggtattcaccagtcttccttgttctcctccttacctttgtattcaaatgccaaacactgaagtttgtcattcagtacagagtattttttaaatagagtactattttaaatagtaaaatggaaatgatgtttttcatcctatgaagagaaaattgtaaaacttaattgttaccacctttacattcaagaaagaaatttcttatgaatgacaatttgtgggaatctggtatgctcttatgttgacctggaaatagaacgagaccaagagggtgaagggataagatgtaaatatttcttagtgtgggagaagaggggatgacctttgttcataggacacttaggagctatattgggttttttgtttgtttgtttttgttttcttctgctccataataattgaactaatatggttttaagtaattttgaaaacttatttcatcatcagcatttgacacaaccatatcaaggagttcaaagttgtcgaacaagatattaatcagagagcagacaaacatgaattagcatcaagctttccctctgtcttctttttcacttcttaaacaacagaactccatcacttttcacttggaaaacaggtggtatatgtagagccttcgacctctttgtgtaccgtctaccatggtgccacagtcatataaagatgacatgagtgttcttttgactttcatatgttctccaaacatttagagtatgaaaagaatattttactccaatgaagaaaattgttctgtcacccagaaaaacgattcctttttctgccgagattcccttgccaaaaactaattgcttagcataaaaatgctgcacttgtttcatgcattagtaaaatcaattctctccactataatactgttcagccattgtgtctgtcagtactctgggtgcaaagctaaaatctgaagctgtgtcaccagacacaaaagtgtagaaagcttggcctcatgtattaattttagggttgattttgcattttgtgagctcttggggcattgtgtgctttctgttctccctctgtaacctaatatttggatctgtgcaggtggggaggtcctaccattcaaatagacagagacagaaccaggcaggaaatgaggtgccagggttcatgcattcaaaccattgaacacttccctatgccaaatattagtggagctcaggagtgtggaggaatgtggctattttttaaatgactgtaagttaatgtgtgtactggatgaagactttaaaatccaaaatggtaaatggttgagcagaggtaaacacagatgggatgttgtcaaagcacacagaagggagagcaaaaagggaaaaaatgcaataactgtctgcaaaaaaaataaataaggaggtataagaaaaagtactatgtgtggaaaatttttatcatatttaaatcttaagcaaagatgctcacagagaaaaatctacactgtcatatccaatgtgaaagttgtgaattataaatttgtccatttgcatggaattgctctgcctttaccaatggtcaccttatgaatgtgattatgaaattcaagatcagttctttcaatcaacaaaatgaaatattttaaagtaagtggctctgctgtctagtttttatcagtttgatacaactaaagtcctccggaaagaggagatcttgactgaggaattacttccatgagattggcccctcagtatgtctgagggtcattttcttgattaatgattgacatggaaaggtccacccagcctactgagggtattgctgcccctgaactggtagccctgggttgtataagaaagaaggctaaagctgggcgttggtggcacacacctttagtcccagcactcatgaggcaaaggcaggcagatctctgtgagaccaggctggtgtagaagagctagttccaggacatcctccaaagtcacagagaaaccctgcctcaaaaaaacaaaaacaaacaaacaaacaaagaataaaggctaaaactaggcgaggtggtgtacacctttaatcccagcactggggaagcaaaagcagttaaatttctatgagtttaaggctacccaggtctgcaaatgagttccaggctagccagagttacacagtgagaccctgtatctaaacaaataacaaaaatcaagtaaaaaaataaaaaataaaaaaaaataaaaaaagcaacagacgtccaagccatggaaatccaaccaacaggcagttttcctccattggtctctgctccggttcctgccttcaagtttctgccttaagtgcctgtcctgtgttcccttgtgtgaagcagtgtaacctgtaaaccaaataaacccttttcttcccaagtcacttccagtcatggtatttgtcacagcaacagagaagcaagctaggacaacagcatattaaaaaggttaaacctttgctcatgaatcctcctcatacagtcctacacaacacagtgactggttgagcactgtgtttgaagtggaggatctatgaaagggaaggatgcatcttctctgcagaaactctttagtttagttaagagataagcttactaccacgtacataggcagatggctcaatatattactcacaagagccatgaaacatggttataaaacagcaaaaaaaaaaatcaggcaagaaatctgccattaatatttgagtattatttagatgcacagtacaccaacagactgattttcaattagaaaaaaattacaaagaggccctgcaatttttgctcatgataaacatatctgatttcataaccaaaaagactactaattaaatatgcctagaaaatcatattagattagattgcattgggtcaggtatctgctttcatttcacacctaatggtctcttttaagatcatagcaaattaagaaacagctatccaatgagttctagtccccctattaggaaggaaaaacacactttgtaatacagcacctaatttgcctagataattttaattagtgcagtgtgagctattgggcagttcactggcagcctcatctgcaaggaaatgtgtctctgtagccctaggctcttgggacaggaaaatttgagagtccccccccccccaatggatagaaggttagaaatgaagtgagtcagtctgaagacattaagaaactgccctgttctctctgaggaactgctgacaaagatgaagaaagtggaacccaaacaaagcctgagaccttgagaccattgactttgaaaggggtgatgagtccatgcaattaaagaaatgcaagtttgtgcctgccatggtacacaggtggctgtactggagatgtccttgtccttgcgttttcatttctgcttgtgtactggtaagcagactcttcttcacctgacagggctcactgggtagcttaagcgggagctgaacttgctacatagaccaggcctaccttgattcaatcctcctgcctcattctgagcactgaaagtgtccttaggcctagtttaagtctgcttcaactgtgacaacttccaaagctcagttgtgctaattgtgccatagtctcacaatgaatagttgcctattgactaacacaaaaaactcatctccttcctaactgccctgatcattgatctcaatcttattagaagcttccatggccactatctactgctaagatggaatatatatgatattttaacctttaatgttcaattaaattttttagactattttgtgctcatttagatcttgttgtatcatctgcagtcccttactaggatcttcaaaacattgccatataaggtaatgctcaaaccgcatgagcattatgacagagatacatacacccttgggggccattttaaacctaccgctatggacctcaggtggactgtaatattccatttttctagcaaatgtctggattaggctaccgactgcatcattttgatcagaaaatggctatattataactttgtaatgttgttcttgattaatctcaatcagggaagacttacccttctcattttcatactgaaacccatcagaacaaggggcatagtgaacagcatacagttcctaggagatggaacctccaagaattaggcttattctttggagtgacagactggatgtctgcttctagaggcaggaccatgagtcaggaacccaagtaactctgtgctactaaactgagcagagaactaagagttgggggttgggggtgtaacacaagttctaattggtcttaataataaaaacctacagccagatattggggcaagtgctgaaagatcagagagagaaaagagcaagccacagccaactcttaccttgcaaactcctctgctgaaagaaactgagttccaatctccttcctctttatagtcctctctcttcctgcctgtacagacctccagacctctgtggttagctagggagtagctccaccctctaatattcaggaaagttttattagagtataaacaagatatcatcatgggggtggcgagcagtgagccacaagttgatgacaaagggtctaacaccagattcttccaactggagccaggactgattatgaaattagtgttgtgaaaagtgtacttagctctcaaactgctggtggggtagacttgaactagagctctgaatatttttaacaaacatcttgaatggtccagatgcaggtgactgtggctccatatgacagaagcactaaagcctaccaatgtaattaggtttgagttagtaaggtaagttagagtgacattacatattttccagaaaataaaacaccaaaaaagttatttttatcactaaggagctattggacccaagacatttggatatactcttcaagaagctataaactttaaacagttcaaggtatataataaattgtttactagttttacatcacagtgcatgttatattcactgtaataaccatatcatccatgcatagttcattacaacatgtaaaatttaatggacatgacatggtagaactatattcccattaatctctgcacatagactttgctgattaaacctttatcattaccctaacacactttgtcaaatcaagcaacggttggaaatttctcaattacctattcttatactagtgtggcctagtaggagtgctgtaccatagtgttagaaccccacatacatgtgctagaattagcacatacaatgggcattattcgatcatcaaatgagcaattgtagcatatgctagattcccatagctttgggattatcttccctcttgttatactcaatccaaagatgatggctttggtgttctgaaacctaagctgtagctggaatacattcttctaatgcccactctgacatttatctttatgtgtttaattgtttgagtaatttctgttccttcacttagctataagatcttctaagttataagatctttaagaacaagaatcatgtaccttttgctacatatattactcccaggataatatctgatgtgatgatttcacttagaaaattgttggcaagtgaaaggatgagagaatacatgagcacagatttcagtgaatcagaaacctttctcaacggtgccactcccttcccaattcatctttattctctgctgaagcccttccaccgctattaaaggttctaggaaaccacttttccaagaaagtattgtaaaatggaagagagaactggggcacaattgaaaattatgttagtgccatgatcatccagttgagaggggaggaagaacctgcacaactgcctcatggcctctcccttcctcaagcagttatgttctgccttcatctgtgattatcctcctcttgatattgcagtgtgttctctggggtgttcttaagcatctcatagcatattatttttccccacacttggctaatctgaacaacaccatctctccattttctaaactggagaaaatcccatgtaagtgagaatcaatgtgatttggtgatttgaaagctatggaaatgataaaagtaaaaaccagcatctagttttaaaaattgcttcagaaatgcccttttccaggggaaacagtgaagttctattcatgctggaataatgaatagcaataggtggttctgttccaacagcctatccaggctctagcaagtcatctctctatttgatgtgtacaatgcactagcaagaaaaggctgctgggatagctggactcggttcttaactttgtctcatggaagaaggcatgtttgttgttcctgcacaaaacctcaggtgaatcagctgtctttaatgagacttatctcggcttaggaaaagcatgatttttcaatttcctttcatagtcactcttatcctagcaggtgtgttttcttcttggtgagaaaactaagctggctttcaaaagttaaaaaaaaaaaatcatggttgttatttgtaaggacaaaacataaatcgttgaaactttctactgtccttttaaattgctctttaattcacacactgatcctatgtctgaaagttaaatggtattgatagagcctccttccagtccccatcacttggcaatcacatgaagttctaaaatgacacttgacaactctttatggatgcccctgctctcaaggaccctttatttgagtgttactgggcatttgcactgtgagaaagctgtctgttttgaataacaaatgggatatttaagaataattattctggccaatcctttggcatatcttatctttctttataacttggtttttaaatgcctttgaatgaaatttatggttggtgggtcattcatgtgtcattatttttcccctgattcaaaaaatatgaacagaaagtcacttattttaacctttacattttcttaagctttctattctgattacactaaattctgtaagtctttcttagagaagtgtgtgtgatcttccaaaaagtaatatagttgtgagaattgtgttagaaagtaaagtgggaaagtgtgtgggtgtgtcatacagaaacccagaaattactctgatattcctcaaaagaataatttttgtagaaaataagtaagaaacataatagaaatggaaatgctcaaaattccttagctaaggtatttacatacatgggaaagaaatagtaagataaatttgataaaaaagagctagaagaaagtacattcctaaagaatttgtaaccacataccatatcagcaaacaataaccatgatgcaactgtgaaaaaacacttttttatttcctgagtaactacattggccttacatcagaggatctgtcatgttccatgctttggataaggtaccgtggtaatcaacaaagatagataaatagtccttgctcttaaaaaaactcagcatttggagttaccacctatcattatttgcagctaggttggagtgtctttccaagttcgggactcagcacctttgtttttctagccttcatgtcacctgtccaagactttcattccattattcacacaacaaaagctgaccaattgtgttttcctttgttttaacatattgatctccaataaaatatgtaatggtcacaagctccataatgtttaaagtggacatctccaatcactctgaaatattcaaatccgtagatgactgtttgggatactttgggtagttgactaacagagaagtggacatttcctgtagtataattatttcttaaatgaaatcacacaggatgaagtagaaacagctgtcagaaataaaaaagaattcatggagaaggcttaggctagctgtaggagtttgccctggaacaagaagacaagacaaaaaaggaggaggaggaggagaaggaggaggagggaggagaggaggaggaggaggaggaggaggaggaggagaagaagaagaagaagaagaagaagaagaagaagaagaagaagaagaagaagaagaagaagaagaagaagaagaagaaggcaagacattctagtgcgtagagagcatcatgtgcccaatttgagaactgagattgtgtgtgtgtgtgtgtgtgtgtgtgtgtgtgtgtgtgtgtgtgtgtgtggtgttctcaacaatctgggtgaagcatttgtccttaaagaaagcagtagtagatcagatgaaagatttctctatcaaagaggccttcttgcctgaggaagatttgtcattgtgtggaagctttgggggttttttgtttgcttgcttttgtttttgctttgctttgttttgttccagtagttactcctggaaagtttggtattagtagtggctaggagtgctgttaaataaactacaaacattcgaaataacagccctgcttcatttaagggttcatttcagacctattcctcagacctttctagccattcctttactactctttactctgcttttggtttaatggtgtttgttaacctatagggatcaaaaattcatgctcactaatcaatttttgtcttcctggttattagcagatattacaaaacctgccattccttattaccataacataacatagtacgtcattaggatcatgtggaaagtggaaatgttgttctagtaaatcagaggacacaaatccttattgaagcaagaaaaatgaacctttgggcacccaagatatatttttgtaatagtcttttaccactgtaaccttctggctactttcatccaaatctgtttctgtaaagccatattttggttgctataacaacttgatgtagctcttgatgagctcttcttgcttaatgttgcttttttaaaagttaaggttgctatggctacaaaatgctgttttattttcagcaagcttttttctctttgtaattttgctttcacaatttgtgtgtgtctatgcatgaatctatatgacttgagtttgctttctttgcaaagtgcacagtgcagtcaacccaatacctaaaacacgcctaggagtagaggacacttgattgctttaggtgcataatattatccttaagttgataactacactgttgagagaacacagattagataatacataatccttccaattatgtattatttgatgaaaggatttctatctttcttttataatttatttagcatgttctctatattatcatctattcttgtttccaaagcacttcttcctcggccctggatggatcatttgaacagagactatgaaagcatgtgtgtcattgacatggtcatgctttccattgacatgttcatgttctatgcattgttgattagggcattttatattattgataataacactattaaggtttcctttcatttaattttttaaagatttatttatttattatatatacattgttctgcctgcatgtcagaagggaacaccagatctcattacaggtggttgtgagccacactatgtggttgctggaaattaaactcaggacctctctctggaagagcagcagtactcaacctctgggtcatctctccagccactcattcaatttttgtaataaagctagaaattaagatctttttactctgttatgaactctatcacagttagttgtctaaacatctgctaatcactggtccatccagaggaacactgttcaatagaagaaatggtcaaccacatagaaagctgagggctgagtttatagctcaggggtgggcaccttggctaccatgtgtaagtcctgggttctatacccagcaccaaaaatccaaaccaaacaaacactaaaatgccagcaatagaaagcatgaaatactttagtcacaaagtttataaaaattaaagtttatgtaattatacaagcataaccattttaataatataccagctcagtatatctaaaatttcatcatttcaataatagagatttttaagttgttagattgtctttactgttttctttcatttggaaaatcctgtggctcttttgcttcacattttatatgaagcataattcaagtgctcaacagacacatgacttctgctgtataaaacataccgaactttagatctcaggtggaatgagtcattcagcaacatttcctacttattcctcacctactggattataggccctttatgaaatcttaggaatacatagaggttaggtgatctagtcagtgtttcgtcctcttgacataagatacagtcatccaggaagaggattctcctttgagaaaatgcctccatcagattgcctataggcatttttcttgattactaattgatctggaagggtaagtccatgcagggcaagagcactgccaccccagataggtaggtagtcctgggtagtataagaaagtaaactggtgccgggtgggtctggtccatgcttttagtcctagcactcggcaacagaggcaggaggatctctgtgagtttgagaccaacctggtctgcaagagctagttccaggacagcctccaaagtcacagagaaaccctgtctcaaaaaacctgcttcagttcctgcctccaggttcctgtcttgagctcctgctctgacttccctaagctacaagatgaagcaaacactttcctctccacattacttttagtcagtgttttatcacaacaatgtaaagttaacacgttatagaaactatttaataaagaccgaggaaggagaatgaagagtaaaaggagaaagaaagagcacaggacaagagaagggagagggaggaaacagaaaagaaagacgtagaggaaagattaattgtgcggattctcttttcaagagtgagtcttttcctgctattgtgtgctgttagccagtcttgctatattagaattaaaactggggcagtagacactgtgtcctgtttgttgtgtggctagtccactgctgtcttcccacattcttaggaaatgcaggaggcagaccacacacccacatatatttattgcatgaataagtgaaactcctttcctgctaaagtgggtgattgaatctaagactaaaataaataaaattgccccgggaaagtgaaatatcaaactgtatataaatttttaggaaaatgaagcaaagaatggctaaagatttaaaaatgggattttgtatagaagatgattttttctctcctttcatgttgtttttcttgctgattaaagattcttgtctataagtaggcaaatagaagcatatgagtgattgaaattgttttggtcacacactgcaggtgataaagccaaaatatcattgaggtgtccagacctttatcacatcgctgtttcttcatctctttcctgcctcttctcatttggaagaaaccaaatcaaagtggccctcatgactttccagcctgcttggcaaaggaagcttctgttttctttctaactgtgtgtcattttttatcactgttattttagagagagcagcttattgggtaatttttaaagctgagtcattttgcctggaatgtagaggttctgatgatctaatctgatttggaaagaagagaacagtgttataatttgagtggactcctaaatcaggttgcagatggcagtgtgagttgtgaattaaaatatttgatagcaacagctcttcacatcacaagaaatcccaccttgctaccatcatttgtcacatgttctctttagaacctctcttcagtaatacagcacactgcctggcttctgatgtccctttgacacatgtaaattggatctttgttcaatccatttcactttcagagtttaaactgggaggtgctgctaagatcatcattacagttagagtttcacggtggatgatcattccatgttagcctgaagggtttgttcatctcaaatatgaaaacagaacagagatgagaacaatttcatgtttctatgactgtatcatttctgtctacactggtaatggaactattgagatagccctcaaggagatttgtttacagcaaacactagactgttgtttgaaacaaatgaccaaatgggaagctctcaaagttattcactgtaaacttgtgtttgcctctagactgtgtgagccattcacttccccgcaaaaaaaaaaaaaaaaaaaaaaaaaaaaaaaactgtgtcactattcatatattttttacattatttttatgtgtgtaatgtatgtaatcctgacacttgggaggtggtggcaggaggatcaggagttcaaggttatccttgactacatacaagagtttgaagtcaatttggattacaaaagacgctgtttcccaaaaaacataccaatatttttgatagtgtagattatatttatggtcatctgcttttttctgagctataacttttataatactgttgccaggggtacaaatgtagctcagtggtagaatgtatttgttggtttatgcccttgtaatacacacacacacacacctttgatcccagaaaacattaccttacacactgcctttaatactaggacactaggcctgaaagaactgagatgtatagccgagtgtaagggcactagaaacaggatattttagagatggagaagtgttttgaaatggactaatccaattattttcaaactttagcctgtcagtccccttacttagaaggcataccccagaactcaaagcataaagtacagatttccatgccaaggaagaaggaaggggagtggagaggatggccacatgccatcatttcctcagaacacccagagtttagttccaaagccacagatctttacgcacatccatttgctaattagatactagcaaaccaaatgatttgttcaaggcaggcacctctacttaaagcctggatagtcttccattcattcatttaaggaatgcatgggcatccttcatgtcccttagtagttctcagaacgttggaggactgggatccaactgtagccccccccccagtgaaaagccagccccttgtaggctaagaggacctggaaatacatttgagagataatttcactaacatggtgccacagagtgacttgagaatgagggacggaggttggagaatactttttggaaaaagtgacatgagtttgcctgtatctctgctccccattgtctttcataatttaaccatccttggttaccaacaagtccataaggcatggtacagtagaaagaatactgattaggaatttaaatatctatgtgttaaccctagttccgtttcctttctgagatgcggtgtattttatatctgtgagatgacagtcatcatgcctgcacaagattaactaaggtccctgctttctgcctacctcattattctcctgtacactatttcccgctagtaagagattgcttgatttctcaagacttcccaaatatagaaggattcccttttagaatttcatctcaagtccctatttcccataagagattactctgtttcacacaaaggaaaaattattgttgttttatttgtttcttgtttaaacaatttcagatgttggttgaaaaactttgctggggtgtttatttgttttggtttccttgttcttttacaaacaatgacttcctgtgtaggtcaaggtggccttaaactaaagatcctccttaggctatgattacagacatctactaccatgcataaagcaaaagttacttattaactttttaaaatattgtttcatctcattagaatatcaccaatagctgcatatttttttcttcctccatttaaccattaactgttacaggccaaaccatgtctgattcacaaccaggacacagttcttgctcacagataacagagatgtaagccctgcccagtttaccttccaaggagaaagtatttctcatatctgtgttgtttttgttttgttttgtttcccttaaaagtattttaacagtctcttctattttactttgttttcctgttgctatgaaaaattccccctacaaaagaaactgaggggacaaaaggattgtctggctcacattttcaggttatagggccaccacttctggaaactcaaggtagtctacaaccaagatcagagagcaatgaaataacacatgtatgctagtgctcagctccctttctctatgcttacagaattctgtgactagggaatagtgccacccacagtgtgcagatcttcccacctccatttacataatcaagaaaatccaccacacacacacagccacaggggaacctaatctggacagcccctcattgagatttcctttccaggtgattccagactgtgttagactaacaatgaaaaaaaaaaaccatcacacccccatcccaactgcattgataaatatcacaaagatgaactgtgaacttgaagaatttaagaaatgcaaatgtagtggtatacatgacagctctaaggtctgtataacttgctattcccagacatttgttttacagccgtctgtctcctggctgttagttacctttgactgaagaaatacccaagaagtatgtgcataatctatttcactttattctggctacatagtggggaggctcaaagtaaacaggaagcagttgtttcaagccatgccctgtaagggactaatgatatcgttgcctttgtgttttggtacagagtcaccagaagtcaattagctgcacattagccttactagtaaagggcaaatcagaggcaggggatgtgtctgaatgaaagggaatattaaattcccatttaaagttcaaaaatggaaatcaaatatgagtgtttggtattttatttgagcaacaagctaacgaaggttgttctgctgtagctaagctcattcttctgccatcttttcttcagaaaggaattctaaggaagtgggctttgggggtgggggtgtttgttttgttttgttttgtttttggcatgacttcagttcatgggaagtgattattccaggctgagactagaacactagagcttaacttcaaattgggaggagaggcgtggtaggctacagtgccactctgctgaaggcctttttttttttttttttttttttttttgcttggtgccatcaccctggtataacagaatgggtccagatgaacctgaaaggtgcagattttcagccctctgagaaccattataggtttcataatccgctaagtattttcctgatagaataaaaaaattccaacaatcctaaaagtgaagggaaaccacttttacaatagctaactgtaggataaaagtggtcttttaatagacacattccagtggtacactcttaaatgaaatacatagtagtaggagtttctgcttcattaagtttatgctgacacttagttgaagcaatgcttgagaagagaagtagttaacttctttaattgtccttaaggaagtttgatctagagcaggactaggcaaaaactttctgcaaagccagatggtaaatatttttgacctcatgggccaagggaccaaactgaaaatgggtataggttcttaaaagtggtttgggggaagctactgccatggacctgtttgcctggaggcaatgggatctcactgaagatgagagagggaaagctgatggcagtatttagttagccagttgtgcctggggcctctccaaccccacaagtcatcctcctcactctcattcacaagtactgtcccccccacccccaccccattctcctctgcattccctgtgtggtaaataatgtccccattacagtcagcagatgctgctccagtggccccagccagctggactcttgctcctgcccatgtggtagatggaagagagataaattcctaaaatccagtgttaaaataggaactgaatttttcactgtggtagaaatatttgcagcttatgtgggttgtggtattcctgttggggagagaggggatgggatttctttttaaatacaaataattgatacagaagaaaaaaaaaaaccttagaaatcattctaatgaatgtctccatttcttctttttatggagggtgttctgtgattgaaacatggttggtcttgtttctttttgtaagtactctttttttatagaaaaggataaattcaaacattttaaaatagttttctgagaacatattttcattttgagctacacagaatttacctctgtgccctgcttttgatccattaaatacattttaatatcaggcttaaggtagcttgactcaaatattttgacacctgtgaaacaataaaaattctcatccctctgcaccgtctttttctcaaagtagtagttctgttcatatgttgggaaaatatccagctaaaagcacaagtggtcaaatttcaattagagagactgggcagactatttcccaaactctatcaaagaagaagattctcgttcttggagcttctggtcattatttttggatcctacaataaccctgggaatagccacaggtcaggaactgggtatttgtgggacatatgaactaatcctccccattcaaacactttagaaggaaatacaattgctcaaagagagaaaaagtggagtacagaaagaggagccagcctcagaaaccatagctgcgcatccaagagaaatggtcattgtggccaccgtcctcatcacagcaggttctctttttgcacagcatctagcagcatgtattctaagaatttgatatatattaactcattttagtactaacaactatgaaaagacacctgagaaagcaacttgaaaggaagagaggtttattttcactaaccattttgtcacttggctccatggcttctgggtcgatgttggtgatgcagaatacggtagagccttctatggcataacacgtagttcatttcacagagaacaaaagagatgcgaaaactgggaaggatctagaacaagttctagccgccaaagaaatacaccacacacacacacacacacacacacacacacacacacacacacacacagtggtctccttccttgaaataaggctcatatttgagtttccatcacttgccataatgtcattaaattactaatcaatgagtaggtttataaataggttatgtccgaaccctcataatccaatcacaccgaacctttgacaaatgagcctttggggcgagaatacttcttatctgaaccaaaaaatagaccctatctctcagacaaaggactgcagtttaagagagtttggacctcccacaatacagagctatagatttattatcactgaacatgtcaagcaaaggtatgccattgtctgcctggtattagctggccattttatttgttttgttttgttttttgagacagggtctattatgtagcttcagctgtcctgaaatttgctatggagaccagcctgttctcagactcacagagaagtaactgcctgccctgcctcctgagtgctggggttaaaggtgtgtgtcactctgcgccacctccatcagcatgtttttgacagagcatctcacccttgtctaaagcatttcttctcagttggacctacaacacagctttgttcccacatagcatgctcctctgtacagaccagtgggaaacttaaaaatgtaaaatcctaatccttacctggtatttggccattttaaatcatgtggaaaattagagaattgggggaggtgggggatagaggtggtaggaatcacaggagaaatgaggcccggatgaattagttagttacctgcttaatagacagacttgcttacttggacttgaggaagaggaaggaacctccataactctgaggtctgagtaaattccgaggtcttgtaattgggccaatgaacatgtgcagtcttatgaatccctgacaaaagcccagattatgccctgaaggcatttgaacttgatggggactctccatattctatttgatgaaagatgggttaggaaaaatcctctgacagtcaagagacaggtactttaagagtccttgcccaatcaaaaaggggaaaaagtaaggcacttaactaagatccaatcaaatcaatcaagcccaagactcttggttatgtatgggtggggtgggggggttgcctgtcacacaggagggttcctagagctctagccttaataagggaatttgtgttttctactgatgattgcattatcaactcagacagaatggcaaaagccctctgagcttggagaaagaaagctgtttacatattcttaacaatcaagcttcaaatgatttcagagctaataggtcgtttgccatttgctatgaggtctgccctgaagctcctaaaacttgttgaaggacaatgagctcaagtgggtcttttccagttcctcctttgatattgccagggacaggggagagttgctttggcacctactaccatattattagaaggtaagccagtatcccctggtttgtttcctgttgtccattctgtcttgtggagcgggttggaaattcaagcttgctgtgtcggactagttgaagtcttgtaatgcttactggaaattagcaaagcagcaggatatttctgtgagttatgcttattagatgctgttttcctctctagcttggacctaaaacactttttaaattgatccatatagattgtattgttgaggctaacatgaactattggagaaatctggcttgtaaatctaaacaaaatgtctgcgtcacaccctaaccatttctataaagctgaattggaggatgtagaaagtagaaaatatgcaaataatctaccttctctcccggggaggggctttccaacatcaacaaccaatctggctttaaaagtaagcataatgacacagaccgcctctttctgccttgcttagaagcatgagcaaaaattcccattgtcacccttccctaattttaatgtagtcttagaaaacaaaaagaacaacagtgatgtggccttcctcttccttgctttgaaccatcttgggttttaaggcctgtgtttctcaggccctcatttctcaggccagggttacacaaatcctctattttatatagtttaaacatcttctgtgccaagtttacatttgcctcagctatcccttcacctgatttcatgagctaagcaatagttgcattcgttaacttttgttctgctatggtaaaataagccaggcaaaagcaacttgaagggggagggacttattttagcccacatttgcagaattcagccaagcctgttggagaagccatagtggcaggggcttgagtcaaccactctacatctgcagtaggggagcaggagaagggagctgcttttcgttccctttctcattttcttcagtacaggaccctggcccctgaaatagtgctgcctatctttaagggggtcaccctcctcaccggcatgctcagtggtacctttgctaggtgtttctaagcactgtcaagacaactgaaaccatcacagtagtattgccctgagatggcccatgagaaaggaggaagcaaagagaagtctctgaagtgactcaaggtactacaaacacagacatttaccccaaggctctaatcaacttttcaggagcaatgagtgaagcttattccagtggatttcacagcagaatttattgatttatttttttaaatgctttcactttcttttttgtttgtttgtatgtttgggttgtttgtttgtttgtttttgtttttttgagacaggattttccctgtataactttggagcctatcctagaactatctcttgcagacaagactggtctcgaactcacagagatccgtctgcccctgcctcccaagttctgggatgaacggtgtgcgccaccaccgcctggggccattttcttttcttttcttttcttttcttttattcattttgcataccaaccacagttccccctccttcccctcctcccctcccccacctcccactaactgacctcctttggggaatcaacaaaaccttgcacattcagttgaggagttcagagaaaaagaggaggagggattatatgagcaaaggggtcatgactgagaaacacacagaaacagttgatccaaacctgaggaagcccaaggacactagactgactgctggggatcctacattggacaccatagtgggttagaagagaggctctggaactggatacaattctaaactctctggtccataatgacccacacgaggacatctgggttcacttccgtactttataactgatgccctcatgcagagggtctggtttggttccagtagggttgaaactcatagtgctaggcgagaccagaggctaatttttataggttaattctcaaccttcatcttgaaaccccttttacacctaggaaatatttgaaagatatctttttccttttttgggctatccctttgtagaacatctctattaatgtcccagcctctgtctttccttcatgcattgttttgtggcaatggaaaactagaggaacaccaaaatagcctgaacagaaggatgtgggactcctcagtctccatagttaaagtgttttgttagtgagtatctgtgtagcttttcattccttgtaaaatataaacctgtctttcagataaaggaaaattcaagccaccctcttttgttttttaatcaactgactcagagtattgttgctgtcagtctgatctataattcccaagatttcattcctgctctagaatattattaatttgatctgctgtttcgagatttctctgtgcctgttgaatttaatttggctctgaagataagtcaatgaataattctcacctttgggctttcttttgtcttaaattttattttgtttgaatatttcagcaaatcaaatccaatagagaaaatggacactagatcctgaccaggtggatttatcccaggaatagaaagatgttttgtcatttgaaaagcaatcattgtaattcaacgtaatgatggactgagaaagaaaaccacagtatcatctccatagctataaaaacatcaagacctcactggatcttttaaaaatataacatctaattatgtccaaaagcaacaagactttcatcaaactgaagaaggacaacttgattgtattagtcactcaggctctcatcggggtcagtggtgtataaaacaacaaaaacttgttgtctcaaagttctggaagccaagagtccaacatcaaggtgtagacagatgggaatcttccttcctgcatggccaatggtctccttcattctgtacctttgcatggcctgcatgcctctctcatagaaataactgagcagattctcatcttctcatcctttcttttcccttccagtgctggtacttgggcccaggaatacatatatcttaagcaaagactacactactgagctaaatgctcagacctctttttatttctgtagttggagaaagggtttctcttgcccagactggccttaaactcactctgcatcccagccttgaacttgtgatcctcttgcctcaacccaccaatttgccagaatacaggctttctagttctaccacgctcagctggctcatccttttgaaagaagtcagtcctatcagattagcacccacccataacctcatttaaccctttgttaccccctctaatagtgtcacattggtggttagatcttcagcatactttggtgcttttatatttcttaaaattcagaaaatatgtttctttgttggaaaaacaattgaaatttaaatgaaactcagtattagccatgaaccgatgactccaatttgcaattttgatttacttacttacataagaattgaagcttaaccaaaatgtgtagaacattatttagtttaactagacatgtttcctcccaattcttctttttactggtttcctttctttatgttcctactattggagaacaccaaatgtcctaccaccccaaagtataagtcagtactttaagatgaaatgcactttcgtagaaaatgttttctttaaaaaaaaaaaaaattcaaaggacagaggcggtagtaatgcaaggctttaatcccagacttgggaggcagagggaggcagcactccaggccaccccagtctacacatagatttcagaccagccagagctacatagtgagcccttgcttcaaaggaaaagaaaagaaagaaaatgatcatgaaagtgaagtattttgtccatatcagagattaatcagcaaacactatgttatagataagatgcttgcataggcccgattcgacttacacttttgttaacagtgaaagtggtttccttcttggagacttgtaaatggagaatcttgtcagtagtaacagtgttcagtctcaagctgagttacatcacaaagccaatcagctgatttgggggatataattacttggattttacatcctaaaactgtaagatttaaatgtaatttaaatcttattaatatgactgaaattttgtttgccattgttagaaaacatatcatttaagctaaaactgatgtacaagagagactgagttataacattagctttgtaaatgacaagggcaattactcaattctctcagttaaaaatgccaaaacaccacctcatataaataaaaatatttttactgatacttctatatgaatatttacgagtatctccacaatgaagatgtgaaacagatcacattgggatttgtatattatagtctcatcataaagctatatgaagacagagaaaaatagtctctataaaaacatattctgctaagcgtaccataactggagcaattccatgtttataaatgagcttttagtaattgacgagctacaatggtagcttaactggccttagctcacatccattttcatttgtatgatgggtgtagcttttaggatggtagtgagtgtagaattgctcaaggagcatggacagaaacatagcattttagggaaggctgagacagcaggcaggaacaaacataacaagaactgttttgtttaagttcactctcaggaagacacaactattccatgtctactaatacattttctttctgtggaattaacccttgtgattccatcttcaaaactggtgaccattcagagttggttttagtgatttgctttgttttgctttcttgccttcctctgccttccaaacactgggattaaataaggtgtgtgccaccatgcctggtctttttctattattcttgtgccttctttctatattacaaatacacactggatatcattccacaaaacatggcccgaactcatgttcagtgattcagagatttattggagtggggtaggaaaccatacaatcatagcttttactaattcagcatgaagtgacaagaaagggacttctttagtgccctcagtgacacatctattattaagtcatgccactcagttttgtaaatttgttaggcatttggggttctgttccgtcatgagagaatctcaatcatgaaactggagcaaagtatgctgaccagtgcacactggcctgctaggcccattcttcatatgaaatgattcagatgggttactaaaaatctgtggtgtgaggatagaaccttcagctcctgctaaagccatggtataaggaagctggccaattaagttttctgttctgtagtcttctgttgattttatgatgtatttgtggccttgttctggatcctaataaacagatttcagccccatacattgaatatcattgcgttctcatctctgtctgaatcctctttacatgcagttctttccagaacaaattcaaatctttatatctggactaattcttctgatcttttatttcccagaagaatgttctcaaggtctccaaataccgctttgtttttctgaaagaactatgcagtaattatgtttctctttaaatttgatgtgggcacacttgtgagcataaagatggtcttcatggcaccattcacatatgtgaaaaatgaaaaaaactgaattaatgaaaaggttgtattatgatactgctttatggtagacaattacacagcctttaaatgcatgtctttaaaaaaacacagaaaattaaaatcagaattcctatagcatgaaaagcataatttagttgtgataaaatgctttaaaatatatgaataaaaataaaatatatgtgttatgagcttggagagatagctgggtggttaaaggcacttgttgcttttgcggatgatgcagatttggttcactcaaaattacctgtaactccagtcctagtggatcagtgccctcttctggcctccacaggtatctgctcatgtgtagtagacatacagacaagcaggcacacacacaagaaaattaattagataatcaaaattttaaaatcattatatatatatatatagatatatatctatatatatatgcataacaaaaaagagtgacttttcccggaataaaatccatggagcaagttatggtgactcacatttgtaattccagaattcaggaggctgaagtagagagagttctgtaagttcaaggccatagagtgcaatcttgtctccaaaggataataggtagcaatggcaagacagatccatcagtcaaagtgcttgctgcccaaacaacaggacctgagtttgattcccagaacctatattaaaaacaaacaaaaaaaaatgaatgtggcaatacacttataatcccatctctggagaagtagagacaggcagacccctagagcatgctggctagctaagcctaatccaggagccccaaactaatcagagacccgtctcaaaagaactaagtggatggctactgaggaataagacccacggttgacttctgacctccaggcattgaaatactcacatgtatatttatctgcacacattacctaacatatatactcacacacatttaaaataaataatgaatgcataggtggtaatagcatgatggacttacattttcttcgttgtttccagtttttctaagtaaatgttccttttctcatgcacacaccttcacatggcattccagatcagatatgacgcacattgagtatgtgggccatatccctatttcatttgtgcattgcttcatttaaaaaatcagaatttgaactgggacatggtgggtggcgcatacctttggtcccagcacttggaaagcagagacaggcagatctctgtgagtttgaggctagcctgacagaaagagagagagagttccagaacaggcagggctacacagagaaacactgtctcaaaatatcagaatttgaacgaaaacatttcatattttgaattatccataaaggatctagttggactaaggtctctctttttatgtcatagttttaactctctttttattgtgttcatcttctatgttagtttaattgggtggagagtgattgactgtctcctagaaatagtgtaatatgtgctggataaattaagtcagaggaaaaaaggaagaagtcacttaacagcgcgtcaattttaagctggcaagatgattcagtaggtgtggatgcttgccctgaagtctgacatcctgactttattctgcaggacccacagacccacatggcagaaggagagaacacattcccaaaagttgtcctctggtctccacatatgcaccatggcactcaacccctaccaacccataccagcctacacaaacaaattaataagtgtaattttaaaaactttgaaaataataagtaggtgagattagatctaatgaaaaagaaagaaaaacaataacacgtgttggagaagatgtttttaaaaggaggaatttgttaaattgaatttaggttgaatatgtgccgggcgttggtggtgcatgcctttaatcactcgggaggcagagacaggcaaatctttatgagttctaggccagcctggtctccaaagcaagtgccaggataggctccaaggctacacagagaaaccctgtcttgaaaaaccaaaaaaaaaaaaaaaagaaaagaaaacggttgaatataagtttatcatattacccaacagtaccacccctggatatgtatctaaaggagatggaaacatttctacaatgagcaagaaatatacaacagcattattcatattggccaaaaatatggaaatcaatatttatcaagggataagtgaactttaagtgggtatattgattcagttgaatatttgtgggtaagaggaagtaatgattcagagatgcacgcagcaatagcgatgactctcaggccatgctaagtgaaagtgacagacaacaaagactgtagcttctcttgttcactttatgtccagagagacaaatcggagggacagaaaggagcttaaatttcttggagtttcaaacggcaaagagtcagaagatacctctaaactgaaataaatgttctaaaactaaatttgtggtgattacatgcctttaaattcactaaaacccaccactgatccaagaatttaaatgggtgaatttatagtgtgtaagttacccattaataaagctgtcagaaattcaaaaagaatattttctatgagactcagcctgatgtgaagctgtcgctcactctgtattcctgttatttcctttggaaactgtttgaaaactagcttgacatgaaagctgaatatgcaatcctctgtttattttaactgtagcaagaacgttattgtagaagtcaacaactacttcctgttttcctatctacatgcttcttgttggaccaagggaaagaaaggggccattgcattgatgtatgtaacagaaatgttcgcctcagtgggatgccttggtcaccattcattatggctgtcacagagcatcaagatacctggatggctgttactcattcttctctgaggttttacaattaaaaaaataactcaaccttgagcacaaagcatgaaatatgaaatatatgaatctgttttagaaaacatttgccactccagtgactgggagcactacactttgataacaccagttgctagataactatattcaagaaaagaatttatatatatttgaaaaccctgcatacacatatctaggaaaacatttctattgacaaaaaaatttgatgactgaacaatttgctgtgcaatttctaagtagagattttccccctaaatttctatttcattttatgttttcactttgatctgagcaacacatagaaacttacaaataacaatgctcagcatcgattgacaagcccatatttcttctagtttgtaacttttgcacagcatcaatccatccctctttgggggccaatttcagcattcttttatggtttgtcaatccctttattctgtattatttactaccagctcagctaaaactgatgtgtcaagaaggctctctgttattgcagcaaattcctgaaacaaatcagctgataaagacaaaagatttcctttgtctcacagttttcaggttgcagtccatggctgtggggactgttgttttgggcctattcgaactcattgtgtcagaagtatgtgaccaagtaaaggagtccatttcatgaccagaaacaagagagaaggaaagaggagcaggctggataaccattattctgtttgaagccatgtaacacaccaggcctcacattagatcccaacacttaattgggagacgtgggtaggagggtgtagaaacactggcacccagataaagcaggatcactgcaatcatgcttcatgataaaacactgaagtcataaatacacagcaatggataactacttagggttgcctacctccaacattccagaatgcatagagaaggtgaccatgaggccacatctcttccctgaggtgctcttggattttaatggttgctgctgtgggagaggtaccattttcttcagtggcatagctcctgggagactagtgggagaaataatgggttcatagggagagtaaggaagatgacagagtaatgggattgtgttccttgtacatatgtattaaattatttaaaaagtatcaagattcacaatcttctaatagcaccactttaagaacaagacttacatggacatgggcttctcaggacttttaagaactaactggagctcttgaattgctatcatctctgggattgactggtcaggcttaggataaccctagataattttattaggtgaaagtgtctccaccagtgttatctttttatcacaactataagaggatttggattattatgtcaatctgtgttgactctgtggggttttgattttcaggcatttttcctggtatttattgattcattcattcattcattcattcattcattcattcactgagctagccattaagtgaaaatctaccatagtgccatgtaccagaaatataaataggatagacatctctgcctcaaaaatcacagcaattggcaatgaacaccatgtagtggaaaggaagcaatgaaggagtgtaacaggttgggccttacaactaaaccttgataaaataattcagttagagaaaggataaaagacttggccagcaaaaagaaaatctcaataaagttgttgatatataagcgaatatattgaagctgggaataatggcacacacctttaatcccagcactgggaggcagaaacaggagtatctcttgtgagtttgaggtaaggatgatctacatagagagttccagaatagccagggtagtacaaagagaccctgtctcaaacaaaacaaaaaaagaagaaaggaaagggaggagggaaggacaggagaggagaggggaggggaagggagggaaggaaagggaagggaagggaagggaagggaagaggagaggagaagagggaaggggagggaagaggggaggagaggagaggagaggagaggagatattgaggttagaggtcttgaaatcttaagtttattggtgagtgggtcctgttagggagaacttctatggattgttcactctggttcttctttatctgcaatgaggagcagagcgtttgggtgaattagatagaattaggttgaaagaaactggaaaagaaatgaacttatcttaattattttaacaacagcaataaaaaaaagaagttagagtgtatgaaagctgctgcacgaaaaggtaaaatttaaaatgtaatatatgaatgtaagtcaataaaagcattagtttttatagcaacatcatcaaaagaagagaggggatgatgaaagaaaggaaaggaggaatagtagaaagtattccacactcattatgcaattatttcagattaaaataaaaaattaagttgagatttaaggaaagaaccgccccctacaccacataatgcccatgatccaatctcatttgtagttaatttgccatgaaaggcacctgttgaccagcagttgggtgttggtcaggaaaaaccaagccatgtgccaaactgtaattagttaaaaaatgtcctagacagatggccattttggcacaattggcataaacaatgtatgaattgctgtgaattgctttaacacattatttctctcttccaagaaacttgatgtagacccccatgtgactcctgtttatcgacccatcagtaattatgggtctaaattaatcacttggtttatcactggctaattactcaagctggcccctctagatacttcagcaacaaggaaaccgtttagttaaacaatattaaataaaaatcccaagtacacaataaaagaaagggagtgataaatctcaggtttgaaccctccacatagttaatacagcgatggaaagatgaatccctgacaggttttatggtatacacttgcaattccagcaatctcatgcagaggagtgaggagtctcaagtcagaaaccagtctcttcccacgttccaggcctcagggctgcacagggaaagcccgcctcaaagcaaatgacaatttttcacaggccattgaaactaattaatcactaaccctggttaacgtcagtaaatcatgtaatattcttggacaaatacattaaatttttaatgaattagaaacttttgtttggcattgcaatgtgttttaagaacctgaaaggaaactgaagttcaattacatcagccggcatatttgtttttgtgattatgtgctttctcttaacttatggctgtattcgacagctggttttagaagacagagatcagtggtttcctgagaccttgaacaccttagtctatccagcagtaaattatacacaaaaagcattgactctctgcaattcattctagaaatcagcatggtgagatgagaagacatctgggttctatttgttattcaactgtggtttagtgtatgctttgtttattgccagtacttgggagtcggagttaagattgcaggagtaaactgactgatgtcaaacatttccccaaaagcacagccaggtttatggtttgtcatggacttgtcatgagagagtaaagtttggacaagagatacatctgagaaggctatacccaaataataagagggattttgcccttgatctcagccaaaatctaaagatatatttgacttagtctctgcttgtgttgtttgttgctttattttctatgtgtgaatcccccccttttttctcctatgaatttcacctgtatcaaagcctctgatggaattggtggcaaataggaatgcctaatttagttaattttccctgagctgtactatttctgaggaaagccttcagtatgcagaacgtggtgctaaatactaaggtaggaataagttgacttgtccgtacctggtgcttaatttagtgactggacactgggatgactccatgagatgatcactatttcaaattcccctttgaaaagctccctgacttcaaaagttctgcatcctgccaaatgtggaatactccaagtagctaagcaggagtgggaacaaagcaagtggtcctttcaccaattaagtgactgtaacaattagttacaattgataattcagttgtctgacactaatacatttaataagctttgaaatttcatagtagaaatatcatggcctggctaggtgttttgcgtgtgtggcagtgttgtaaaaacaaagagcagcattttcttagcttagatatattgcttattgttttcattttttcttggaataataatggaagtagtttttaactttcaatacccagtctgaacaattttacacagctctaagatcctccaaaatgagtaagtgtgtgattggagcttggaggtaagcagatgggaagaaagctgtcttacctgcaataagccatcacaggaagatgtacacataatatttcagtatttcatatgtaattgactcttattattaaccatgcatcttatcattactttggcaaaagttccagagcagaacaaaataagacattgactcattttgtcacaaactatctgtgattttttatgtattttatttcctgccatcttcagaaagcaaacagataagcaaggtggaaaacttacagatgggaaagatgtgtggagcacagcccatcactggtcatcaccacggagacagcagaaaatcaacattttttcagttaatttgaaatatattgaaatatatataatatatattattataaaatatataatatttttcaatatatatatattgaaaaaactgtagccaggttaaaggaagtccatgaatacccagataaagaattaacaggtatttatttagggagcactcacacaatgatggtaaataaccctcatggtcttctgctcctggagttgcggcctctccctgcaggatgctccaaccacaacccatgagaactcagtctacgtgtggccaccagcccaagtccactggctgagcaagatgccactacaaaataccgtttcccaattaagtaagaatggaagggagccaactaacaaaggctaaaaataaaagagatatgccctgagggatagaaaatggcatatctgttcaaagaaaagtgctggttcctcatcaggacaatgacttctgctacacactccagagctaaggaggtagactcagttgacctgagaactgtcattttcaaggcatcactcaggatttttgtcagcagttgtgtctttaaaacaatttttacatattttaggacaaaagaggtaagggttggagatatttctagtgatatatagcatgcatcatgatggagcatggaaagattatactgaaacaaagaatactatttaaagttagtattaggcgctggagaaatggctcagtgattaagagcccttgttgctctttcagaggacctgggttcaattcccaacacccacatgaaaactcacaactattttgtaattccagtttcaaggaatctgatattctctctggcctcgatgggcattccattcatgtgctacaaagatatattcaggcaaacacccatatacataagataatacaatataaattttttttaagttagtattaactctaaactttctggaagtcaagagttttaaatgtagtaagttagttcttacctttcatttttctgttaaaagaataaataagtcacttatgataaataaacattttgtgctattaaattccaaatcaaaagttaacacaagtattttatgtaagttattttattaaaacgatgatatgatattttcatagtaaagcatttgatttgtctgataaaggctaaattagtcaattttctattcaaatgtataaattccctttgctctctgtactctcctagctatgtgacctggagtcactgttcttagtcactggatctgtaaagttatgtaccaaaagccagatccctgaaacacagcaattacctaataaaattgagctacttcagtcattattcactttgttctcaacagcacagtgaccatttataccaccccacttcccaggacctacaataaatttctggactttaatagcagtgaaaattagagtcttaattctgtgtagtcagccaacttgcctgtaatatcatttcctgtattcagagacatgcagcatttatattcttaggtcagcagtagatcgtgaggacatggtatcaggaatgtgaacttatctggggctggagagatagctcagtagttaaaggcagtagttgctcttccaaaggtcctgagttaattcccagcaaccacatgatagctcacaaccatctgtaatgagatttggtgctctcctctggcctgcaggcatacatgaagacaaaacactgtatacataaaaaaataaataaatctttttaaaaattagaatatgaagttactaaaggatagttgatgggtttctaaagatgtgagtctgttttctcttttgaatttttgaattcttgtatatgcaaaaataatgctaggtggctaggatatgtatgttgaggatgaggaagtaaatcagaaagtaagtattgaggattagccctcattaactattctagttatttttctcagttgtctagttgcagatataaactgtcattttcaatttgacttatccttgcttagtacccaagaagcaacaggagagaggaaagcatgaaataatggattactttcaggggtgtccggcagatagagttctgctcaaaagtatgtaagtggagaatgtgtcctttattcctacattggtcattctgattccactttccatgaattttcaaatattcagggttggtgatagcaagggtggactgtctatatacagtaaccacaaaaaagaatgatcagatccattgtgagttctttgataaggtgagataatagatgacagtaaaggaacaatgtcctaagaagggaattttcttccaggagtttgattagagactcttaatgatgttctgtggggtactcactttggcaccttagtaatatttggagtattctagatcttagagaatgtggaactgaactagacctctgtttcaactgaaaataactaacaatgaactaaattatcatcaagggtcatgtaggaaaagacaaatcaaatagataacgcacgacaccagaaattttcatccagggtgccacatgttactgggaaattggggtctgctttgtgggttcttagtctcgttagtaaaagagtgtaagaacagatttaagaggaaaaaaagaaaaccatgacatcattaaacagccacatggcagacaagcagccacatgggaaggaggggagcttcagagaaagagtgaggaaatctgcccagagcttccagaaaagcatgtcaaggctttggtacatatcaaaaagggaaaattagaaaagagggggaggaagaggaggaggaggaaatgtgagccaacagctcacaaataatgacatggagacttattattaattatgaaagcttggccttagcttagacttgtgcccaactagctcttagaacctcaattaccctgtttctattaatctacaatctgccacatggctctcctctgtacaatatgtccaacttcttcagtgtcttgccagcattttctggcctctgttctttccacagttcctttctccctctggatatcactcttatcctttcctgcctagctattgactgtccagctctttattaaaccttaggcagagatgcaagtttacagtgtacaaaagaagattatcccacaataaggaagacagaaaagttgtgtttttcttcagaaaagctctagaacacatggttctgtgagtgaatgccccgagggcaggctttctaagaaagaaaaaggcattagctcattaaaaaggcaattatttctcccatctctttagtgtggatgctggtgaattgaccttcctaggagtgtgtgttggggagtagtctccacaggctcagctagatgagatgaactcttctgttttgggtattttacagtgttccctctccacttaaggcctccactttcagccaggaagaaatagctttcccttatttaatgagcctctgcagagccctgatcaagggctactgtaattttccttgctctaaagaggtaacagtaacatcatataggacataggctgaaactggggaagaggtataatctgcttccaccctgaaaattcagagatccagttccaaggctgtttatcagaaggggttgctgtctggactaggcttgggtctcaggtatgtcttccaggccagggtgcccaactaggaagagacaagaaaccagagctcccttcttgtattcttgactggagaaccaaggacattcctgaaactgaagcttttgggtttcttcccctaaactgcctaaccagttcctatctcctgtcttcatcagtaaaaccaatcagaagtttttattgaagaaaccaagggctgcctggaatgtgctggatttccatctcacctccaaggaattcactgccttcagtccaaattacatttacagctctctaaaatcacaagaaagagtgtgttttctgaaacaactaatctatgctcttatcttaaatccctgacttgtaataccatcaagtcttcccccttttaagttatcagttaattcattctggcatgaaagctagggacttacagaactactgagacacaaagacagaaactgatttgtattattattaactgctcatctgatgttaaaaacaatattttgctggtgaatttagggttattctatcttcctgttacgagtatagttgaacaaagacaagtatggttttactcttttaaatattttctctcaatattgttttagttaatacagacaaattacttctattctatgaaaattgaatataatgtcccaccccctaaattctagtcccaatatacataatttaagatctattgattttcccctttctgaatctccaagataattacttacatatgcatatctctaggaagttctaattatatattttaagtttttgacacttgataaatgttggaagaaaattatccttcatatgaagctactcaatgaagctacagatggctttttttcttaatttgatgtttaaaagcaagcaatacttttattttgaaaaggacaagcttgacctgactggcttcaactgactgaagagatctctaattggtctggatgtgaaggattacccgctgagtgtttggattaatccaaacacttaggtgtagaagtaattccctggtgtccttaagtgcaactgattttaaaaggccccaaagatcttgatgttgaagtaattctccaccactttcaagtgttgctgataaaaacaaaagaaaataaatgacaaaaaccatagacttcctctaaccagctgcagtagtctcccatcttcactttatttcccatcccctgcttagcttcccaaagtagacattagatacattcaaggtgatacagctagagatgatctcaatcgtctccatcagcctaatttcattctgagttgtatggacatagacatacaacttcttcatttatccatatactatgatttttatgacaaccccctccccatcagcttttgagaaaatgctgttattcatagactcataagctgaacaccaggttgtggccactacccacctggctaatgcttctaagcctttttagcacatggagtgtttttttaaatgtttatgttttcctattctgatttatctattaattcaagaattgactctgttcacttgtacaccactttgcttgtaaaactcatttcctccaggaatgatttaatgtagcttatgcttcacaagttcatcgtgggtaccatgaaactcattatatttagatgatagcactgcaaaccatatttcaatattttgtgctagcattttataggtttaatattttatatattgtatatgaattggcattttagttcaatttcttatgaaaatcattttgaggaaatatgcctttgtgctggaaaaatacacagaagctttatactgatgaaaacacattagtaaatcagagccctctggcttattcgtcaccatttttctaattagggtgtgaaatcttaatttttgtggagcctgattaactgatatagctatgtcatggtgctcataccaatttctgttttgatgggcattgcaatataaaagggaaaaaacagctaatagacaagataaaaagaaaagaaaatgagtcattaccccatgcaaactttgcttggcaccagagaaaatgtggcagccatgtttcagattcatcagtatcaagtaagattaccaattattagctcagctcttgcatagctaatggcaaggggtgggtgggggcgggggcatgtgtagacaaactgagtctggatgtctgtaccaaagaagaggaaccattaaagcaaattattcaacttattgagaaaagttaaaataaaccattctagcatatatttcagatgtctgttatagtagacctgattcatgaaaaatgtttactgactaggtctcttcctcttctttcccacaccccaaataaagttttacgtaagttttaagtcaatacccatttgtataataagaacaactgtgggtatatgtacacacataaactttcatattttatccataaaaacatatgagaagatacattaacataatgggtaaattggttacctttcaagtaattctgataaagagggagaaagtgtaagatgagaagtttatatgtcatactttttcttgttttaggtttcattttttataactatgtaacttaaaaatatacaaattttaaaaataattaacaaagttgaattatctctgtgctggctttgattataaaaacaacctgataagagacacacagaataggtaattatatgaaattactcaaagtcatatttacatgtgaccagttttctaaattatctactctattggttacataattcaatgaaattctgccactaatgtatttaaaaattcattaatattttatttttaattatgtgtgtgtgttcatatgtgttcatgcacatatgtctgtgtgcatgagcatatgtatgcttgtgcgtgtgtagaggtcactggtcaatgctgggtgtcttcctcaatcgttctccaccttatcttttgagaaagggtctcccactgaacccatagctcctcagcaagccatggggatcagtctttctctgcctttcccacactgagattataggtacatgccctgtcatctggctttttacatgggtactggggatctgaactcatatatgcatgcttgcacactcaacactttattgactgaaccatcttatgtttcaaccaatgtcccagtacccctgccaagcatcttttacacttttgtgtctagtagcagcatgctccaagccatggctgaggacattcatgtctcctctgcttatcactctgcctttgttggttaaagaatgtctcatcgcatcaattccatgtaaactattatgaaaatccagctttaatgccagcctccaaacttgatgaatttccaattttgagttccatttatatctttggaactctgcccgtaaatcctaatgtgataaatgaaatgggaggcctctggggtaccagatggcttcgtgggaggaggagctgcctggacacagaggaaacattgatcctaatgcagaaatactcacatagatctccaggtctatcttgtcagaatgtatccatagagccatccttacctacctgtgaagtgaacacaacagtattatgctgccacaggttacccaataggaaggaaaaatgagcaccatatttgtttaagaaaaacaaatgtttactaagtagttaggttattatcaatatattatgtaataatcttacaatagtgtttcttgaaggctagggctttgtcaataaatgtattcagttcagcaaggtactgagtgattcaatgacattgaaactaacaatagtaatcactattatttcctatcttaggcatttcttacgcccttctcctatgttggctcttaatatgaaaaatagtcctatgacatatgtactattatcctaaatgtaagaaagctgaggcaccgaaggactaataggactgaggccataaagatggcaagtggacaaaaaactcttgaagtttcactctgaagtagaatgtaaaatggagccataattaaaaaggaataggctcaagggaggattgtttgaggcatgagatcctggaataagtttgtatttttaatgaggacgagtcaatagaaagggagtaattgaagacaaagaagaaagttgaggtgtcttcgggaatgagaagaggtgtgggaggggatgggggcattcattaagtagctggctaaatgcacattctcacctcttcacccgtttttgtgcctctgataacttatctgaaaaagcaagctgggctattagtgattactaattttttttcaaaattaagatttgatggatatctaattacttggcagttttacactgtaatacaattttaaaacttaccaacctcaagaaaatttactgttatcctagaatctttcttgttttggggaaatcacttggctttcataatagaagagctctcgataatcagaatgttcaacctatttaaaaatacattaaattttggatgcatctttgatgtttaattgcttattgttctgagacacaaaattgctgaggcttccctaatgagtcggtaattaataggttcttgctctaatggtaacaccgagttacctgctgacatgcggtttagtccacagcttgttttcaaccaactttcagtttactaacaactatacttctcttgaataaaaatcattttcccctgggacaagggagatgactccgaaaataaagtgcttgttgtgcgaacttgaagaccccaaatccatttctatagcacccacataaaatctaggacagcaacctacctataaccccagagctagggaggtagagatagaagccaactagttagactggccaaaaaggttcaccaagtgggtgagccctgggttgagctagagactatgtctcggtaaataaagtgggaagaaatcaagagagaccctcaatatcaacttctggcccccacaagcctatgaacaaacacacccacccacacaaacacacatgtacatatgtgtgcatgtgtgtacacatgcatatcacaaatacacaaaaaagtcattttcttctttttggttacatttgaggaaattacattttctacttacatacatacaaagaatattttaaaatctaccaggatcttgaaactatgtgatctcttcattgtgtctaccacttattattcgataaatatgtatcaattgccttttctgcattctatgaactttggggggggtgaaaatgagtcatacataaattagcacttaaaatgtttacagttttgacaatgggagaagatgtgcacttcttcccctcccaccccttccttgagtgaacttcaaaggcaattataaatttttaatgcaacatgattatttgaaatagactattgactctgaattgaatctgtggtcctgcatcctgtgctctgtgtttcctagactgactgaaaatcatatgaaagagtaagaaaccgtctaaagaggctacacttcatttaatataatactaatgataaattaattttcatttcccccttaaaaacagactcctcattaatcttcagagcattgctgtgaatagcaagaagggaggtggcattgggttttattttttctctttaattagctttttctcctggagctagagggattgataatgtcaagttaccctgtaaatatttttccttgagcatttttcttgaacttccaagtggcctcaacattatcacaaagagttttttgttgttgttgttgttgttcagtgacatttaatattcaaataaagccaaatgtgtcactttaattttaagcctccacccccacaaaaagaaaggaaggaaggaaggaaggaaggaaggaaggaaggaaggaaggaaggaggaaagtagggagggagggaaggaaggaaggaagaaaggaaggaaggaaggaaggaaagaaagaaagaaagaaagaaagaaagaaagaaagaaagaaagaaagaaagaaagaaagagatcgtggagtgcagaaagaaaatacatagagacttgaaagcattagcactgttacataagtttgtgatgagctctggaccactggatttttcaccctctctccctatgattcaaatcttcagttttgcacaggcaaaaggactggaaagtaggagctactacttccctttgggaaaccagtaattcacttgcattgtgtatggaccaaaaggagcccatgatgagtcaccacaacgagcagaagaaataatcactagacagtatgtttattgttaacacattaagtgctctgggtactttctttgtagaaccaatctcacttaaattaatagtaatggtgtttaaactttctttcctctgaaaagaaatccctaaaggatatttataatcattctcggtataaggtaaactcttcagttgctaggaaacatacttgctgaatttgtttctccacagataagtaaaatactccttcctgtgctattattctgtgggtaaattaatacttatctagggcacattcaaaggagaagaagataacacagtagccagaggaagcctattgtcaaggaaagcaaagcctacattagaactgtttataacctgcagaagtgctggccaggaggaccccactgcaaagtagttacaatgacacaccagtgagaagtgaaatgttgacctcttgctccaaaattattctttcaataaagagcagtatcttaagccaagtacatagttcttctgtgtgggggccacgtgaaatggcaggtctcattctatgaatttaactcaagggtcatatcagtaccctcactcctctctagatccaatgctgcttgcttttgtctcagtctgcaggtcaaagactgtttcttttgtgaagctggcacagatcaatcattcctgggagccaaaaattttatttgtcaacacaaaaattgtccccggcacacaggaggtactcaggggtgaatacgaagtcctcagtgccttctctatcctgggaaacgtggggtgggggtgtcctctactataatgaattagaaattttttgtcttctaatgccttacattttgcctcatccaaatactgagccccttcacagtagtccacatctaactcagcattaggatatactgtgccaaccacaagaatgatgtttgcataatcactcataaaaactaactaggaataataaggccaaggaaatacagcattcaccagtctggaactattaaagaatttcatatgtactatcaaaaaccttacccttgacttattttatcaaagcattacagttggatgtgactaattttatacttaaacttcaatcaggtcacttcctgcagtatgtactatggaatatggatgcatatcatataatttctctaatcaaataatttttaaagatttatttattgtatgtgtacaagtgtgtgcatgagtgtatgtatgggtaccacatgaatgctggtaaccttaatggccagaggagggtgttacatccctgtaacaggaattacaggtggttatagtctgcctgacatgagtactgggaaccagatgcaggtcctttgcaagactgataaatgctcctagccactgaggcatctgttcagcccctataatgaaatattttagatattattagtatattagctgttgctgtgactcagatactaggagaacaatttaaagggttcagggggtttgggccattgcgtctgggtcccatgtactcaagcagaagatcatggcagtgggagaatatgtagaaggctgttgccctcatggtggacaggaagcaaatgaacgaagaagggactggagaccaaatgttaccttcaaagcaagagttacttgttctatctgccccctttcaagtttcagagcctcccaaaatagtgcctcatctggcaaccaaatgttcaacacgtaagcttctggggaatatttcatatccaaactgtaacactttgggaaatactgtaacaacaaacactattgatcttagtggccttttctgtttcttctctaatgtgttgtggctcccattattacccacctgagacactgtttttttctactgtagttgttcccatttactctaatagttttggtccagatgtactctccaggtgtgtctaatataattctgacagtcattacctcaccacaggaagctctccaatttttccttccaagacacgtggccatagctatagaaattattgtgtttcaggactcaagaaggagacagagtgcttttgatgtctcctagatagtggcctgggatgctaaccatcctcaagtatgcaacaaaaactctatcagcggaaaatagaagcggtatatgttagacaatgcaagttgggaatttccgcaaattttccactttatgcctaaggaatttcataccctgggatgtagcaatcacaatctcatattagcagtccttgcaaggttgtcttctcaccatctctttctgtatccaggatatacttcaatcaaaccaggggcttagctttcccccaagcatagtttgtctttcttacctcttcttcctttatgctgcttctttaccttagcatcattgttcttgtaccccctgtttcagttaaaatgtcaccccctagaggaagttgctcttgattttctttgtcctactcttgcagacgaaagtaactggtctggtgtctggaccccaccatatcgctacacttctccccttgtcttctgcttatgactggcacacaatcttcacagctcttacttgttctaacaaacaataagttcttgaaagattgagaatatcattaaaaccagcaacaactctgtgacctgtagagctttcaataaatgtggtcagtaaacatttagattgaattaaatgtttagtttttaaaagggatttctaaactagaccttctaattggttttaaattcacctatatttttagcaataattgacttcctgctcttagtaatgaagcgattttaagagttatcccctcatagaaagaaagtgtccatgcttaatagaaaactggccacaaccaatctgcaataaatgaactatattaggtataaactgttacagctgattttatatggcacaaataaatgctgtttatcatgttggattaagcaaagtattactagtgttgattaagtatggattttttaaaatattttttcttattttatgtgtatttgcatttagcctgcatgtgtgtgcagacaacacatgtgttcctggtgcccacagggccagaagagggcatctgattccctgggaaaggagttaaagagcagtgaagcaccacatgggtactgggaacccaaacccaggcctttgaaagagcagctagtgcccttaactgcggagccatctctccagcctcaaaaaattgggggttttatagtgataaaagaaaacccaatgcaaacttattttttaacaggaaggttaactcagattagagattcataggtaggagtgtaccattcagtaattccaggcctctgatctgggatcctcttggctttagcctcctctactctcagactccagaccaaacaagtttcagatctgtgataggagaatccaaagctaagtgggggaggtgtagaaagaaactccccacaagttccagatgatgcaatctcagacattctgctgttgttgctgtcttttatttttgttaattttgctattgtttttattttcaaattaattttaatcatctttcaaatttttagtaagaggagctggaggggtggctcagtggttaagtgcactgactgattgctcttccagaggacctgggttcaactctcagcacccaggtggcagctcacaactgaatataactctagttccagggaacctgcactctcacgaagacaggaagacaaaactccaatgcacataaaataaaaataaatctttaaagtaaataaataaataaaattttagtaagtaaataggaatttctttgtggcattttcatacttttcatgctactatactttgttcatttttaccacttaattacattttagtatcataataattatatactaattacgagttagaataataatttgatatgtgtacttatttcaagataattttataaatctaaagttgtaggtgaaatacatcatctacttttctgtggtgaaaacatctaaaacctagcttttcagtaactttgtaacatccgttatgttgtagtcagtcaccatgtggtccagactatccacttcctatttgaaacactggctcgtttgatcaacatctctttcccatttgcttcctctctatcctccagcaaactccattgttctctctgaccaaatttgatctttttcaatcccaagtttccatgagatcatggagcatttgactctctgcaccacacacacacacacacacacacacacacacacacacacacacctatttcatgtcgcgtaatgttcatacatgttatcacaaaggataggatgactttctttggaaagctggaagaagcccacggagtacatgaatactctcctataggatgcacatctgtccacttgttaaaaagcaatgcaagaacatttgaatgaacctttcactcttcagtgaagacattctttcagaatttctgtagttttcctcccatctcggatacttgttagactctatccaagtgtgtcaactgaccatgacactgctgatggtgcacatgacttactgtaaccgtgagatgaaatgctgggccacatgcccagaatctaaactaaagcaaagaattcattgaaattaggcaaggagcctaaaacaacttcactttgtccaatcccaaatttccagacccattggaatcctattttataaaaatctgttatttgcagggaagacagctaggaggtatgctgttgagcaacagaaagaagtgaccaggaggaagaaggctggggggaacaggggttctgtgtatctaacatgagaaagacacttgttaaccagtgctcactgggtactttgaataatagacaagctttgcaatgctggagttgaacacaaagagaccaggaaatcattcatgacattccagaacttcagaactgggtccctcatgattccccatatgccaaacttctgatctcagtttagattctagaaaaatgatgtatttttaagccctgtaggactctgaaccttcaaagaagaataaatgctaataagtcattcttgttctcactccagcttattctcttcttatgaagggaagctggaataacaaatgaatgcttccagcttcttaatgataactactgtgaagcactcagcttttgttactccctcctgttcactgaagacaacaggaccctaacttgtggacaaagagtgaacaggtattacagcaggatttgaaaaagcaaattcaaatcatgaaatatgggggataatggacagatattaagtaggaacagataaatactgcttaattccacttgtaattctgtttacattttttgagtgttgtggggtctgaaggcttatgtgatttgccttttacgatcagggatgaatatattcgattgttagagaaaggagccttggctgttataaaaagtaggtaaaacattagcactgagatgtaaaaatgactgcagctactatacccactttaaacctgaatacattatcattataatggaataaaatgtttcagccacaggttttattctgaaaaccagaattataataagatggaactaaatatacttacgtctttccccagccagaaatcacaaaggagaaccagtggaataactcagcaggtgaatgtgcctgctgtgcaagcctggctacctgaggtcaagccaaggaagctccataaatgtagaaagagacaagtgactccacaaagttgtccagtgacctcaacacaacagttcaaacacactaacaatgaattaaccagtcaaaagaagaaattccaacataaggttgttttgttttattgaggcaggttttctctctgtagcttcagctttccttgaaatctgctcttgaattcttgtccatattcatctcaaatttataatcttccacatcagcctccaagggctgagattacaaccgggagcccccacatccaactcctataatacacattggcgcagttcaagtgagtcaagggatagcagcaattaatattacctggacatttgttctcagtacgtctagctttaacactctagcccatgcactttgaagttgcctctattatgtgaacatccattcaccaagctttagactgagggcctgtaatgtatatgcagaatagacacaaagctaaacagacagaattcatctctgtatttccagagtttattccattgggctggtacaagaggggcttcttgggaaggtctttgttacctaaaacagagtctctcatttgtaagaaattaattcaaactgtcagccttgtattagctgaaggactagtcccccaatacataaacatatgcatctgtttttcccttaatatcactcgcagactcttcctctagcatcattccagcacaccatgccctgttccaaacgctcaatggttcttgaacaacttcagggtggtattcatcctccttatggacagtattcaatgtcttctacaatttggccttcagtgactttttccagctgattcattcaccaccacatcttacactcctgtggaattgggtcagtagtaggcggggtaggcgggttcaagaggacccaatctgaagacttgggtctctgaattcttctctgtcttctgataacactgagctgagaccttgtcacaatatctaaactctctctctctctctctctctctctctctctctctctctctctctctgtgtgtgtgtgtgtgtgtgtgtgtgtgtgtgtgtgtgtgtgtgtctatgtctctgtccatgtatctctgtatctataaaaaagagataataataactccctatagtgttggaggcacaaaggtccttgggcccacagagctctagggaaccagaaatgttaaatacacagggacctcttctcaatggaggagataaaaataaaatacctgttttcctgcccaaaaggctggaagtggattttgctaactacctagggacccatttgctatctgtgaaagcaaacctcacccaccttttgctataagagtcacacctcaccgaaattccccaaaatgattatccagactcttccatgcctaaaccattgcccatccttaggggagatgtcacatgtattatgtggcctctgtgctatctatcagagaccacactagattctaggtcttttagctatagaacccaccctatggtcacatgtggtatgtaaaagagtctctatgtagtcactcacaccttaagtgctattgtgcatctggaattggactgattattgcctggaaaccttttccctgattgtactgtgttttaaataagttgacaatgagctgcctggcattagactccccgaagtctgatccaggttgacaaagtcaatgtgaactggactttcatttgcacttccttgcctggataccctcagggagcccctctctataacataaaacatgtagtcatatatttaaacatttagaaattagctagaggggtgcataaatggctcatatgttaggcacatatactgcttttctagttgacccaagttaggttactggtacccatgacaagtggctcacagctgtcggtccttttctggtccagtgtccttttctggactctgtgggcacccatactcacacttacatatactcacatacacacgcacatgtcgcgcatgcacgtacgtgcgcgcatacacacacacacacacacacacacacacacacacacacacacacacacacacagagttaaaaataaaataaaattttgatggtaatagtggcacatgactttaatcccagcacttgggaggccaaggaaggcaaatttgtgtggcatgaggccaccctagtctacatggtgtttgacaggaggggtgtctctacaaacactatgaccaatagagtgtgaatctgtgagaggcaaaaagaaagtccagtccaaaatgactcagtagtcagtgttggctcaaacttagagtctggcatcaggtagtttattttaggcatatttgagcacagcacaatttgggaaaaataggtttcaggtgataataaactcaaccccatgtggacaacaaagcttaagacatgactacatggaaacttctctaaagtacatgtgatatcttctataaagatgggttctatacatcggttgagaaaacaggctcagggtaaacaagctcaaaaataaggatttagggaaggatagagctacagatggactgagataaacaagctcaagataaagcatctaggaaaagcctatgtggcctggccatacagatagggcagaagtcaccagctcattaaccaacttgctccccacctcccaagcagagaacaggttatacatcttttcttttgaagagacaaccccgtgtgtttaacattcctggttcccctagtgcttatctgtgagtacaaggccctccgtgcctcctacagcgcaatgagttccagaccagccaaagatacatagtgggagagactttgtctgaaaaaagaaaatttatttgaggaaaaagttgaacacatttgaagtactcagtgacgccttcaatcacttttcccttgagctctgcttgtattgtgtcctttacttacgatgtccaatttgttcctttatttccattgttttatgtctgtgtccaaatttgcctatttgtgtgtgtgtgtgctataagggtttatttgttgttgttgttgttgttgtcatgaggagaaataggtttcattgtgattcattctctcttgttattatttgctcccttcccttcctctgtccttcttgatgctttccttcttctctgcacatattttttcctgtcatgactcatgtattccattaccctgtctttttcatctcccccaccacaactcccattagagttactcctccgtgctcttcaaagtaccatttctactttcatgtgatgtatttatcacattttctttcatatgtggattttatagagactatatatatatatatatatatatatatatatatatattatctaaatttgatctattttgcttagcccaatgatcttcagctccatctgttttcctacgcatgtcataatttcctctttaaagatgagcacaactccattgtacatatagcccacatgtttattcattcgtctgttgataggcacctagtctgattccctgtcttagccattgtgaattatgcagtaaatacatggatgtgcacaggttatctctgataggctgacttttagagtccttcaattatacacacaggagccatctgtctgggtcataagatgattctactataagttgcttgaaacactttccggctgatttccattatggctgcataggatgacatcctcacctcacctcactcacctcgcagtctataagggattctctttcctcatatccttacccgtgtttttttgtcacttgtcactttgatgttagctgttatggctgggctgagatgtaatgtcaaatcatttttttttatttgtattttcctggagctaaagatgttgaacactttttcaaatatgcatcacccttctgcattgctttcttccagaaatgtctattccattcattatcccatttgttgatcgactggattagttttttctcttttcggcattcaatttttgtagtacttcatagattctaggtatataccacctgtcaaatgtatacttggcagaaagtttttctcattctttagggtctcttgactctggtgtctgtctcctttggcatgcaaaaactttttactgtgatgaatcccacgtgtaaattcttggtattgtttcctgtttcctgtgctatcagagtccttttcataaagtccttgcctacacttgggtcttgcagatgctgaccagttttcctctagcactttcagagtttctggtctatcattaaggtctttgacctattttgattttttttttatttttgcaggatgaaagatatatatctagcttctactgatatgtgaaaatccagttttcatagcaccatttgttgaagaagctatctgttctccaatgcatgttttttaacacatttcaaagatttggtgactgatactgtgtgggcttctatctgggtcctctattatattccattggtatgtctgttttgttttcatgctataaataccctctctattaatatggctgagctatactttttactaattctttaagaattacaaacaatgtgctataatcatatccaaccctctcccccaagtcctcctacatctacttccctatcaatccttttttaaaaatctctgtctctatctctgtctctgtctctgtctctgtctctctctctctctctctctctctctgtctctctctcactcttacacacacacacacacacacacacacacacacacacacacacacacacacacacagttttactgactaacaactactctcaaggatgggacttgcccttaaagaaaactgactcttcctctcccagcatctatcagatgccattagctcctccactaagactttgtgcccaagtgccccctcatgctattattttgtctggcctgatgttgaacatgtttggtgtatgcagttgcaatcctgtatgttcaaatgattttttaaaacatttcttttattgttttaaaaaagtatacttgcaccattcccctttctcttttgtctctccaaaccctcccatatacccctgcttattttttctccttaattgttgttacatatatttgtgtgtttgtaagtattccttgtagctagacatttcctctcctgatcgcctgtccccaaataacggactcagaggctgaatgtgaattataaattctcagccaatagctcaggcttatttctaactatcttacattttaagataatccatattcctaatttatcctctgcgacatggtggtacctttattagcatggcaggttcatcttcctctccctctgtgtctgccagcaacttctctgctctgcctttctccttcccatcatccttagtttggtcaccctacctatactttctgcctggctactggccaatcagcattttattaaaccaattcgagtgacaaatctttacagtgtacaagaggattatttcacagtaattcctaaatacataaatataacctgctcagtctgtataatgttgtctgtatgtatgtgttttcagagatgaccattgctattgattaaccaataagtatgttcttccctggatgagattatatcttccattctcagcattcttcagtttccttttttgtttgtttgtttggttgttttgaggcatggactttctgtgtacctctgtttacctgaaactctctaactttctatatagatcaaaatggccttcaacttgcagagatctgcctgcctctgcctcccgagtgctgtgattaatggtgtccaacgctaagcctggctacatgtatctcttggtgtcgagatgaagcctagtgagcttccccactccaccccatccatccctatccacacgaacatgtctactggtatatttttatgtcttttccttagctactcagatacattttctctgccacaatgtaaaaatatatctcatgataaaaataattctgttttcagaggaactattataagcagagatataggaatttgtggtttctttaatgggaaatggtaaatagaagattgaatggaaatggcagaatatcaaactccaagcattcatctcaaataataataataataataataataataataataataataaaagaatcaactagtcctgtgcctgagatcaagaattcattcacaaggtcttgtagtaaagtgctggtgggattcttcattttgttcggggacatttaaatgtctttgtttaaccttgagaattatggcccattcctcaaatgcacagcatacctgtgagtggttaatggagtggaacagttttgattcatcgaggggctgttggtgaagaaatgttcaggcatgagattcaagcaatattggaactcatttttaaacaggctttaaacaggcaataaagtagagactccccgatgagattcagcagaagcaatgggcatcattcgccagggaattggcattctcgattaggttctcgatgcctaaaacatccagggtactgggcatcaatgacaagcaagaaaaggaaggaaaacatggggataatcctaaatacacttcttgatcataaagatgggaatcagctttaagttactaatcaaaaatgaatggatggagtactcactgactgactcaacaccaggttccattaggactgggaacaaatcagaatcaaaagaaaaatatgagagctttggaaacatgaagaatggttttgtctcttactacttgtcattgatatggagtgcaattaattatatccacctgttcctttcagctttgtgttactggatggaaattttagctagaatgtattggctctttttgcctgataggctcgtgttcattccctgtctttgttgccattctctctctgctggcagaggagaatctggctcttctgccatctgagacagaagacaaccacattggttaaaatacagctgtttatctcagtaaggtccaggaaattgccctccaagctctgggaaagtgataatgggtgcaggcacaaaatgataaatactaagcccagatcctgaaggccaggtgtcttcccagcaccagggctgaattacacagaatattattgtaaacccaaatcaagcctgaattaaggcagccaacacttaaaaagcagtgttatgtgcatgagcttctgcaatttactctttatctacaagcatagccagtgcagacacacgaaccctagctaaaggacagaagacaaagctaaattgatacaaaagtgagttcccacttttcttctttgatttctcttcattcctggaagtttcaacttttaggcctttatcttatagtttctagaaaataatgcattgttgaaataataacagaagaattcttacttttctgtctccctggatagatttctttcctacctgccaaatataaactccttactttttattcaaatctatcttacttttgaaaaaatatgtatatgctatctgccctagtctcatgtttctgagcaaagtactaggtaagaacagaatatcaggaagaagaaatatgaaaaagtgaggcagaagttgatataggaaaattgacagaggggtattagataggtcacccttagctaggacatcattaaattattggtcttttattatttcttatgctcccaggagagactccctgacttgcctggagttgaaaaactctcaaaacatgtggcttccaaaattcatttaatcaaattcactacagattgatgtcttggttctgtgggattggcaaatgataggtgtcactggaaaatgagaaaataataacaggacctcttaaggatttaagctgtgtctccaaattacaacttcctggcatacaatagatttgtgtaaactcttcagagatgtattataacagacagaagctgtgagattctcagaaaaaaaaaaaaaaaaggtcagtgacctaagatcattaagaaaacttcctggaagccagtggactggaatggatcctaaataatagatggggtttgaaagacagagagaaacaggaagagaacatcttaaacaaatgaaggaactctggctggggaaatctgccctgtcttcctccataaatatgaaaatgcaccaaagttagctctcaagcacactcactgctggcctgtgagtccccaacccgccaaacaatgcattgtgggtgacaattattagtaggggttccctaaagaagcagaacttccagaaggagagagagagagagagagggagagagagagagagagagagagagagagagagagagagagagagagagagagaggtgatttataagaatgacttacaggctatggtccaacttatctagaagttgctcggttctggaggctggatgactcagctggtcttcctcatacactggaatcccagagaaatgggctttaatgccagtgaaggaatgggcttgctaatggggcaagagcaggcaggcaaagcaaaagcttccttcttctatgtccttatataggcttccagcagaaggggtggcccagattacaggtgtgccttccctcctcaaagatccaatccagatcaaaggtttggactagaaggggatttacccacttcaaacccacttcaaaaatccctctcatgtgtgccctgcatttctggattgtagttcataccagatatagaccaagagtagccaacagcagacgatgcttaattggaaaccattctctctataactcttcatagtctcgtaattttatgttgaccataaaaccactgaaatttgggtcattttttaaatgatattggacaaaattacaggatgatgctggtgactcatatgtttattaaattccttaaagctcaggatattatgtttagaccagttctatttggcacatctcagtaccactgcccttcctttgatagagaaggaaaactctcagaaaggtaaaagataagtgaagcactagctcttctacagttgcttttaagcactggccacatacaagcatgattggtaaggctcggctctagtgaagtaaataggcagtttatgaccaccctatgttttgacctagttttcaatattttgatgagaatagtgagcaaagctgtcattttgaaaagataaacccaaactctctgtttgcctttgtcctgtacctcagcaagagaaaccattcaaaaataaggggagaagcatagtaagtttcctagttataaataatgtagagattacatgtgggagtgcaggctaagggcctcagtaagaattagactggtacatcatgtggagtcacacatactgtagcgatggggtaaagttttagaagataaatcttgcttccttcagtcagtagatggcatggcaagaagagggaagcataaggttattgactggggaagcttgcactgttagctacatgcaccgggctgagtaagcagatggcagatgacaaaggtcaggttctcactatgaacagtgggagtttatacacaagaaaggagacagggagtcttatgtaaatggtaatagagcagttggatatgtgtttatgaatccatatttagctcaatattgatataggtggttacacacagaactactgatagacctttgtacatgccaaacttaattcccccatacacacacacacacacacacacacacacacacacacacacacacaggcacacacacaggcacacacacaggcacacacacacacacacaggcacacacacacacacacaggcacacacacttgccaactcttgatggagaggactgacaagcaaaactatcctggtagcaataagcactttaggaccaacatctctttttctaacactattcttcaatcaaaggaaccaaagattcattgaaaatggctggttgtggggcttagctagtggatttacacatcaaacttggaacaattcatagtatcaaaatataagaaagtgcaaaaacaaaaaggacaagatatattaaaaagagacagaagccaaatggaatgtttcccagtagccaaagttaaagtaatttaaacaacaaaataaatctatacttacataaattattgaagtaattacataattaatgagggaacagagacaaatctgtctgcataattccaaataatttatgtacagacccaatccttggagacagagggaaacctcactctcattaagtgttaactgagagagtgaattccttccaaataaacacagggaagcaacaagaagagaggctggcttgtaactgaagaacctgacaaacagcacttcacctgagctgccatggtcaatatccacagtcaggtaataacaattctgttgttacagtgtgataaaaatgggttctttcctttttgatctgccttctccaaacccataattcaccagattccaatagagaaatgtgttgtaaaagaagtgactggcatttctcagaaatgtcaagatcatcaaaaataagaaaagtctgagaaattgttacaatcaaaggacaccaagggagacatgatgagtaaatgcaaggtgtgacccaagatgagaccctgacacattaggtaaaaatctttttaaaacactgaataatgcacgttaatattaatgtattatgttgttgtgttcactgcaatcaatgtattgtaatcatatatgtaacttataataatagaaattaggtatggagtacatgaaaatgccatacttttcatttgttttttctttctcctgaaaaagattgttaaaataagttaagagctgaagaaattgctgggtgttaagtatgattagaccctcatcacataaaaagccaggtatggggatacatatctataatcccatggcaaggaaggggcaaagacaggctgtagagctcattggcagccaccctagccaaattgatgagattcagattcagtgagagaccttgtccccaaaaccaagggagtgagcaagttaggaaatcatatgtgcatggatagctgcatacccatgaacacactaagcaatgatttaaaggggaaattaggaatttatttagaattatttaagaatcttctagttccatccattgcctgcgaatttcaagattccattgctttttttgttttttttctgctgagtagtactccattgtgtaaatgtaccacattttctctatccattcttcagttgaggggcatttaggttgcttccaggttctggctattacaaacaatgctgctatgaacatagttgaacatatgtccttgttgtgtgaatgtgtatttttggggtatatgcccaagagaggaattgctggattttgaggtagactgattcccatttttctgaacaaccaccatactgatttccaaagtggtcttacaagtttgcactcccaccagcaatggaagaggataccctaaatgcctttcccctataatgaaactgatgactactttatatgtcatcctagagccctcatccagtggctgatggaagcagaggcagatacccacagatatacactgaactgagctcaggaacccagttgcagagagagaggaatgaagaccaaaggggttaaacccacagaaacagctggcctgaacaagggggagtacatggaccccagactgctgtctgggaggccagaacaggactgacccaaacccctgaacatggatgtcaatgaggaggccttcacactctagggggctcctagtagtggattagtttttttccctggtgtaagaagggactttgagagcccatcccacatgaagggatgcactcttggcctggacacatgggggaaggcctaggcctggcccaggatgacatggtggactttggggaagagggcccaaagggccctaccctccctggagagtggaggggggatgaggtgggggtaggtgggggctgagggggagggttgggggagaggggagagagaaagagaagggattgacatgtgaagcaagcttgttcctaatttgaactaataaaaaagaattatttaagaatccccaaatatatgcatctatccgaaattgtcagagtaaaaataaatttcaaaatatttaagaactctagaaaaagcaaccaattatagcacaaggatcaatataaatgaaacattgcaggccagtgaaatggctcaacaggtaaaggtacttgccagcaagcttgacaactgtaacacacataataaaagaaaaagagccaattcccacaggctgtcttctgatctccacacatgtgccatggcatgcacatacctcccccccaacacacatatacatgtatgggttcacggatatgcaaaatgacacaaatgattatttttattattgctatttgatctgggtgtggtagcctacacctttactcacagctcttggaaggcagaagcagctctctataaatttaaagtcagcctggtcagcatagtgaattccaggctagttagagctgcatattgagaaccttcttaagaaggagagagagagagagagagagagagagagagagagagagagagagagagagagggggagggagagagagagagagagggaggggggagggagagagagagagagagagagagagagagagagagagagagagagaaggaaggaaggaaggaaggaaggaaggaaggaaggaaagaaggaaggaaggaagggagatatggagggagggaaggaaggaaggaaatgaaataatgctgtttgaaatgtaaagtcacaacatttataatgaaactgaatccttcaatatgttctctgagttactgagttcctacctgagtgcatttaacctcacaaggttatatttctgctgcagttcccagagcctgacaaaggtttgatgtcagtgatataaagaagcagatgccacatgttttaggccaggcagacagacagagccaaactgtctttatttggagaaagcagccttcggtaacacataatggaacggctgcagctgctgtattagttagactttttcctcacgatgataaatacccaagggaaacaaacgatttgaaggaggaaagatgttttttaactaacggttccagcggtcagctagctccattgttttcaggctgaacaaagtcagaacatggagcaagagtatggtaaagcaaggggtaaatcttatggagactaggaagcagagagagacagggtggggggaggccagagacaaaaggccagagactagattgtttaggcgtaagccccacccccaccccatctctctttcttgccccacccgcccctaagtaagcccaccaagcagcagctcctcctccagagggtatttaagcccccctactcgggagcagcctcatggtttccccagatcacccaggaatgcttcactcagattaaaatctggactttagttctacttgatcggcttagtacattggcagagttacccactaccacggggatattttaacacacttccagtgaactacctcttcttactagaccccacctttggaactacccccctcccccaaatgccgccagattatgacctactccattgctactatcagagaacccttgccactcaatgattgtacccagcagctgggagcaaagccttcggctggtgagctttgggggttcgtttcacaaacaagtcactcgtgttctagtaaaacttccttacagatgtgagcaagcaggcttcagtgtgctagaagctatggtgtgctaatttctcttttacattagaatttggacattagtgtaagatataattcacatgctatcaatagtttatcaaaaatcttgataaagttgcatcgagaaagttgaatggagaggcataagagatcgggggtggagtggggggggatataagaatcaaggagaagacaaaatgaacagaggtcaaaatatcctaacatgtttcatgtgaaaagctgtatttggttggttggttggttggttggttggtttttcgagacagggtttctctgtgtggctttggagcctatcctggcactcgctctggagaccaggctggcctcgaactcacagagatccgcctgcctctgcctcctgagtgctgggattaaaagtgtgtgccacctacacccggcggaaagctgtattttttttatagggggccgtgtagtcggaattcatttccttcagtagtgtcagagtcttagggcttcgcttcagtgtgtggacgtgatccctcataaggaagaggtagggtcccactacagggccctataaggatttgttcaatatgggcatgtgatataattcttcagaaagctggcttcagggtcaggatgatgcattccgagtctgtatatgccacattttactgtctgtacttatttggacccatccctcagtttcctgaaaaaacatgcagaatggtttatatattgtatataaagttatagtaacaactaagtggaaaacttaaatttaaaaaaaaagacactgtggggaaaataatcatgcctgtgtatgtcaagttgtcatgaaaattaaatgaattaaagattgctaaagttgtcaggcatggtggtggctcactcctttaaccccagatcctggggttcagaggcaggtggatctctgctgttcttggccagcctgatctggtctacagagaaagttacaggacagtcaggactagagaaaccctgcctcattgagagagagagggtgtccaattttattttcctataaccccacaaaaacaagacaaacatctattcttgccaaaacataaggcaaaatcattctcaaataattgagaagcagatcttagaccctgtaagcattgtggtgttctctgggggttctgagtaactcaaagtcagtggtcatggttagatcacagggctagtgatgacagagacaggaatttagtctatggtattcttctgctccatcctcctgagattccttgccatgtttttctcccactgtctctctcttctgtccatcctcttctaacactagctcctgtaacaaaaagtctttccaccaaagccacccaagccctgccaccatgtgggcgattgtggtgtgggcggattttcgacaggctgcccaagttcccccctctgtcacgttaaggtcccaagtaacacagagagacttttattaggtacaaatgctacttggccaataactaggatttctcatctgctagctcagtcttaattatcataaatctatatattttataagacttattgaggacgccttctactggcgtcttctcttgctggccgatcacatggcaactccagagcagagaccaggaggaagagagaaggggacaacttccttcttgcccttgcttatatctaagtctgcctgctgtgtcacttcctgcctagatcaccacttctttactacattcccagaatcctccttgactcctagtcccgcctaacttgctgcctcattggccaaacagtactttatttatcatccaataagacaaacatatacagaagcatttcccccatcaagctccagacaaaataaataattaaaagatcaatcttaagaaaagaattatttaccaaatgcttagtactcatcaggctttctcctgggcatcctctgtgaaacattttatccaagtctcataaaatttagtgttatttttatactcagtttacagatggaaaaagtaattcaggattccttttaggtcaattagtagatggcaaaggggttaatatttgaatcagattaccaataggcaaacaaaaaaaaactttaaaaatttagatggctatagtggctcatgcttttaatctccctattcgggatgctgaggtaggtagacttttgtgagttcaaaaccagtctggtgtacatatggaccaaccagagctgaacagtcagtcagttaaatatcagagtgcctactgacaagaaaaataagtaacattgctcttggcagaaacgatggcacaaaaaatgattctctcccagttcttggaaggttttggtgaagtggagctagaggcttccaggcaaagtactaaagagggtatggaaagtgccatgaagagcaacctggatccaaagctcatggcccagtggaggcagggggtaactgaagtttctttcctgccaggtcctgctgcccttcagccccaaataaacacacagacactatattattaaatggttggctggtggttagggcctcttattggctagctctgtcttaattattaacccatttctattaatctgtgtattttcacatggtcttggcttaccagagaatacccagacctgctattcctttggtggctacatggcatctcttcttggtgcctctctcctctcattcctcttgtagccctgcctatacttcctgcctggccaatcagtgttttattcatcaaccaataagagaaacatgtatacacaaaggtgatgatttgatttgttgtggtccagtggagggagtgtattgctttgttactttgtactacttgtggttggcaggctttatgagcagtacctacagtgtgttattcattactttcccttcttattttgtgtctatgagtgtcttttctctattctatatatgtaccacatgactgcagtaacccggaaggccagaagaggtgtcaggtcccttgcaactggaattacagacagttgtgacccaccatgtaggtgcaggaaatctaacccagaacccctggaaggaaagtgggtgctcttaaccactcagccatctctccagcacccctattcattactttccaaactatgaaaaagatagagaatacagcctgacaactaagcaacagtcattattgtagagagatgccattggcatagacagagggatcctggcttggctggaaccagaaagggcagaaattcttgccacagagaggtagaagttcagaactagaagcatgtgtctagggccatcttccacgcatgccaggataaaggcatggagcaacagtgggcaacagtttttactcttggaatgagcccactggggaattctctatgtctattgtgccacttgtacattttgcatttgatttggctgttttatgtttctctctaatcaaagccttcagtgaaacatggggtggggtgcttgatgtctaagaatgcttgttgaataatttattctcaggaatattagaaaattgccagagtgaggatatatcaggcaataagctcagatgtgctttaaataatattctctaaaacaacacaaaggggtggcagcctactcagatatgctggatagatggatcttggccatctggaatatgctgatgtatttttagagcagagtctggaggtggtcttcagagaaaaagcagaccctctatagccctggaaaagctgagccatctggctggaagaacagcatttgcagatacctgtggagatgaataaccaccacacttttcaatcaggaccatagggcctgatgataggtgactgaaaggggctcactcaaatacaagactgaatggcagagacagttaagtggcatagggatagccatataggcaaggcacagtcagcagttaaagctctacctgggaaatttgtcatgtgcagaccacagggagaatttagggtttgtgaatcttaaaatatatctgatttaaaatactgtagcatttcccacttgagggaaatactacaaaattacaaatgcaaatgtggtggatcatatcataagccttggaattttcttgttaagtgagagatctaggatcccaagcctcattatcttttgaaatgtctgcctctattacaacagtttcaaccaataggaacatgataggaacttcaaataaatcttaaataaaactttaaaaggtaaaaataggcatgtggaaagtcttatacttcatttaattcaatatgtctgaagtaatatttcaatttgtgatcagtacaaaattaacaatgaaatatgttacattctttcttactatatatttgaactctcgccacatgttcagtgttcagtagcattgtggcagggggcggggttctgaactaaatgggatatgactagagctttgctgtactcccaaatgatctatgaatcaccaccaacatcatcagcaacaccattaccacaatctccatcaccagcatcaccatcaaagagcgtgttgaaacacaatacgatagacttcaattaagacacactgaattagaatataagaatatatgtttgaattcgttttcctggtgattcacatgcacattaaagattgaaattctctgctctcaaaagctaaaattagaatatctgaaaattactgcagaaacaaaagacttgagagttctcagagaaggtcctagaggaacaatgttgcaaaagtgagtaatggaagtgatttatggaatcaagaagacagcagtggcaaatgacaggtgaagtttgaagagggtagtcagaaatgaaaatcctcaccgatcagtttcaggaaaagaggaaaaggtaacttgaatggaaaagagataatgtgccataaactgaatttggattacttttggcattgaagaggatggcatcgccctggtacaacttaaaagaacgtcccccacgcaggagttacaggatttttttttttcaacaaagctgtgcaaggttcatatgctgtttctccttttctgccacactcatcttccttcctccggtacccaatttctaataatgaaatattttaaacattagctctgtctataacagagatttgggacggcatttgtatgagaacaactctgaaattttatgattgaaaaatgttaatgtggattctgcactaaagatgaaaaatgagcacccttaagctgcctagctgaacacgttcacgccggtggccttgcttagtgatgcatgtcttagctgacagcgcctgcaaagcagtgtgcagggcctgaatgcttcaggtcttctgtgactgtgaagtatttgtttcattataaaaacatctctcattgcagttgcaaatggtattcactcaccttttcagtggcatcctctcctattgctcattgtgttcaagaaaacataactgtttttcactggagcagccatcatatgttagggttcagaagagtctatttcattctctgagccgagatgttgtttggttgtgttggacttttaaaaaaaagcacctggttgatgtagcaaactgagtgttttcatgtctaaacaaaagcctagatatgccgaaccacatattcaagttcacatttccctaatcaagccagtatctgggacataattggcaacaaataaatacaatggtagatggcaagataactatgtgaatatcaatatggcagttgtttctgtttcccctacttacaattgataaaaattgctttaagtttgattattttgatgaaatgaatcagttatttcaatgaaatctatttttaactgtttatgaaatttaatttatttatttaatattggttgacctactcagaagttcatttctgtaaatgaagccataaaaagaaactgccattggtgaaacatgtacaaatagcctgtattttcagagtaacctttctcaaggagagaaaataaacagaaaataaccctttaaataatttcatactagattatttctgtcctttgtggacaagacacacacagaggaaattatctgttgcatggcctaacacaaaaaaatagtcatcagacttcatggtcttatagcctaggatcaattgtactgtgtccaatgactgttctaggccataacaggtacagcccaaaaagactgttttctgaatctcttttctttgagggaactttcactcagatattaattatttaaacatattatgaaaactgtgatcacagatgaatgaggaaatataatgaatgatgccacagttctgattggaccacagaagaagacttcagacttggcaaatagttacattgagtcttgagtgcaggaagactggaaatggaaaatactgatctcagccaaataatagcaaggtgaaagacggcagtgttcttgtagggttagtcagtggtatcctgaggtgataagatagagtgtgttcttaagagtgaacagtaagttgggtctgggttctgaaaggctatgccttccctaagaagtgtggttttaatctgtgcaacatggcacctgtgaaatggttctgagcagtgaaccgaaataagtagatataattttcaaatgatgaattgtaaaagacagaactcagccagcatgctggcatacaccataatcccagcacttgggaggcacaaacaatagaatcacaagtttgagaccaagtagacctgcagagtaaaagccctcttcaaaaagaaaaggtagaatttgttgcacaaagagttgtgcaatggtaattttcattttatttacttatcttcatggggtatcagtgtacagtcctggctagcctgagactcactatataaaccaggctatccacctgcctctgtttcccaagtgctggaataagaggtgtacatatgtcagttttaatacaactggctcgatggccagatatttgttgttgttgttttctagacaggaattctttgtgtagctatggagcctgtcctggcactcactctgtagaccaggccagcctggaactcatagagatccacctgcctctgcctcccaagtgctgggactaaaggcgagagccaccactgctctgctcaatggccagattttaatgtgagaagtaaatgaatggagagaatccaggagaaagccaaagtttccagcattcacactggtctggatcccatggttttactagggaaatggggaacttcttcatttgcctggtgaatcagtgggagacaggtttcacagttcctgtatttgttcacctcctatcttaattcagtttcactctccacagcgtaggtggccagttctaggactggagttggagggatgtattcattgtcttcagcttcatgtcaaccctaaaactggacagaaaacaacatgttgctcttaatcgctaggtaaagcaagagagttaagtctctccttagttgtcaacagctcagtgattaaaaggaagattgaagtgtgttcagagatgagaatttaaaaaaaaaaatgttttgaatttttttacttcggtatataagtgatcttgggacagaaactgagttttattcatttctgctttgaaaataaatgtgtaaagtctttttattcctttagtttttacctccttaaatttctatatgaatttaaatacagagaaatattattacacttctgagatatagtaacaatgagctcacttttttgctcaataatttgtgttttcttgtctaaaagtagtgactattataaaattatagaattaagtagccattgtatctggatattataattagacaacgtaactgacagggtgttatcaacgttgtagaaaccctaaatcagtagcattcttaagaagaagcaatagaattaaccattttctttctgtttttgaggttatcaacacttgaactaattaaaaataaatgtgcagagaaaaacttcaagacaaaatactttctttttaaaaattagtatagatctgggcaatggtgacacatggctttaatcccagcactctggaggcagaggcagacttccaagttcaaggacagcctggtctacatagtgagttatgggacagccaagactacatataataaaaccctgtctcataaaaggaaggagaacaggaggaggaggaagaggaggaggtggaggaggaggaggagaaggagaaaggaagaagacatttatttataaggaggaggaaggtggtgggagggcaactctgaagagacctcagtggcggaaaaggagagaagaacagcatcacagctccactcagtgcctcaggacccacaaagagaggagtctgagtcactgtacctgctggaacccagagggaatgagggggaaaacaacaaccaaaaagcaaagaaagaaactagtatctctctgccttcctccaaaagaatcctttattcctcccagcattgccttagcatcatcaatggtcacttcctcccaggtgcagaccttagcagcagaaggaaatggtgagctggagaggaggcttagactaagagtatgtgctccctgtggctgaaaaagaaaatcccacaaaactcacatctattcaaattccatggctatctaggcatgatttgtgatgatatcattaggaaaataactcttacattcaaagacactgagtcgtttgctggaactcacagccagagctaataatataccatgagttcacttaagactgctgtcctactgtgtaaacagcctgttagtttcacctgcctttaggagaacgacgtaacaaccaacctcacttgcttgagatttccatgtaatcaatttatacaacctaagatgactcatagctttaatattaaatttcatactcttgcatgcccctagcccgtgaataatgtatgtgtgtttatgtgctatctcaataaatgctgaaaacagcaaacaggttgaaagcaaccttatgaaaacaaatatttgccataaatgttgaaagcaacatacagatattgtttgattgtatttctgttgtctgagtcagctggggtcaggaaagtttcatcccttgtaaaactctgttaaagatttctgcaaagtatccctcattcctcccctcccattggtgctttctggggtgttcgataaatacagagacaatgccctttgttagggacagagagaggggggaggagggagagagacagacagacagagggacagagtgattcactagacagcattcaagcaggcacagtttcagcttcctacaacagacagacaggagacgataaaagacagaaaagacattgggagagagaagcagttaattcaaacctggcctcactcattgtgaaactactccaaggagcagaattttggtatattttccttaatgccacaccaactctgaagttatttttaatgtgtttaatcagcataatgattcattcccatcatgtaatatctagaggacttgagcgcctaaaaatctaaacagtagagagacacccaaaacaagcattttttttagaagaacatttcattgggggaggggggaagtttgagacagggtttctctgtggccttggaagaacattttatttttaatacttgaaagttacaaaacacctcatttgccacacaatatgaccagtaatgaaactgttttacattgccttgttaaatataattactactaaaattttaaaactttacatcacatcaaattgtcatttagctgattgtgtctgatgtaattttcatgcataactataagaaatctggtttagaaaccaaatgaccaaaaatccattatctagccattggcaaaaggttgtttaagcgaacatactgtgtacatttttgtctgttgtaagcaaaggttctcttttcaaatattgtaaatttttaggcatagattttattccccaaataagaagagaaattagattagcaaatcaaatttgtgatttttggtatatgtcatttcaacgtttttatttcttcaatttctcttttgtactcttccttctcttttcaccctctcccattcctctttcttttttttacaatttatttatttttattttatgtgcattggtgttttgcctgcatgtatgtctgtgggagggttccagatcttctggacctggagtgatagatagttgagagctgtcatgtgggtgctgggaattgaaccttggtcctctggaagagcagccaatgctcttaactgctgagccatctctccatcccctcattcttctttcttctttttttttaaaatcttatccagatttacagtgtatgatcttaaaaaacttaaactaaaaaaaaaaaagattaaagcataagagatattgtccatgatctcaatatgtttatattttggaagacaagaagatttgattcattgattgattggttggttgaatgattgattgtttgacaaataggagtgatagagacatttatgagtgtgtttttagtagtgagtgggtgtaggtataaaataacacaaggaaaaaaatgtacacaggaatttaaactagctgagagtatggcccagctgtgtttacctggcatgcccagatccctgggtttcctctccagcaccacacacattgtgtttggtggtgctcacctgtaacccaaaatccggcgatggggagcaggaaaatcaggagttcctggtcatccttgactagctataaattctaagctagcccgggctgcataagaccctgtccctctaataacaatgatattattattgcttttgtataagactaaatgaagtcttagaagattaggaattcaagagacacgattgtcaaatcaaactcctgttttatgtgtcttgtaacagattttattcattatggtttatggggtaagcattgacttatatcttttggctccttagcactaactccactttattctgaaaagaactctcaggcacaaccactcttgcttaacatagataccaacaaacattagacatagctgtggcttttctctcacagtcccagctttgtgaagtgaccacttgagggtttttgacaccaaaaagagtgcagataaacttacaaaaggaacaaatgatatagttgagaatgagatagaatgactccatttagtgattatttagtggtcttgaaaagcacaggaatgggtacttgcaacactgggttgatgcagacagcaacattttccttattcttttagctggaacttattagcagcattatggatacatcctttttattcttcctcaaagaaatgctgcaataaaataacatactatgagtactccttgacatgaaatatctgctactttagtgctttgctgggacaatttttcatatcataaatccacccacatagtagatgggagttcagtcagagagttcctggggtgagttgttaaaagccactgttaaatgttgttcagaagtcttgtgatgcatcatttgcattatcaacaaaaatatataataactaaaccatcaaatacaattaattttatatcaatatactatgaaaaacacatcaacatatttacatgtacctattgacacattttgtaagcatattttccttgtgagtcttctgcttttcaaatatattatgtaggttatgattgctttttaaaaatgataccagatagaataatgtgaaaacttttttataaaaaatgtgtgcaacctttattctgttagaatagatccttttccactcaggcttccttggaggttttcacttatgttgctgattgtaaggtgtaaaataaggatgactcagtattgtatggaacatctttcattgaggaaaatgataggatagcatttcatccccacataagccatatgcttagagctcaaaatgtattatgggttccagaaggactattaaacactcacccaccaagtcagcatccaagaagtcccttggtgcacagataccactcacctagacctgtccatgtgttctttatattcccatgccatcacttttattaagatttatttgtctttgctatgtacctccaaatattacttttctgttcactaaatctttcagagcttccaggctccagcatcatctgtctttcctaaacagtgactgttttgaattcaatattatgttcacagtgcagaggtcctgttgatttccccaagatgaaaacattactgagtcatgtgcagggacctgaagacaaaatctggccctgaagttgcttgagattattcatggggagaatttttcagctttgtctttgttcctgcctacagccattgaatgcctcttaaatcactgacagaaaatttaggtcaacacattgcctgaggtcatttaaatttcaaatctgctgccattttcctgcttctagcaaatgggaggggaaaggattgtgcctccagctagtgagctggacctgaaatctggcacaggaaacttcaagtcagagtcaaacttatttatgctctgctggaggaagtgtgtcgagaaggttaatgagtctaaattggcttgctgtctcctgagtcagagccgaactgggactagagacaatgatgagagttagtcgctttcacagattttgcagtgttctgagagtgtggatgggtgtattttattttttatattttgtaatcatggagcctgttattgtgggcccacaggaatgatctgtgaaccaaacccagattctgtgatttgtttaaaccagtcaagtagcaggaacaagatgtttagcgtctacaggcctccatggccagcatagaacccacacaccctggtcatgagccacctgataatcacaacgggatgaactctgcccttttcatgggagcagctgtcattctgtcacttctaagactgttggccctgaaggcagaatccaaggttagaattttgattttcatttctggaaatatgccaagttatagcaacaaacacagttagcacccacaccttactctcccaatgccatttttgcagtgaaaatgacccagaggcattttataaaactggttgtgtcagtccaggcagggaaaggacagtctgggcccaagttctcttgtgtttccagaaagttaagtgctaatccaggccttacatgatggcacatgtctttaatcttagcctttgggagaccaagggagatggatctctatgagtttgagaccagccaaggctacatactgagaccttgtgttaaaaaaacaaaggggggaaagaggttcattaatatatgtacattcttatacatacatatatcttacatatttagctattatgtatttatttatatatttggtatatgcagtggcatgatgaaagggcacagaaaccagattgaatgagatatcaatgaccaaatttcagataatttgaatgataaaataacaataaataaattcatgattatagaacgtatcaataaatctgtttgtatcagtatttgcttgcattataaatgagataaaagatgcttttattgaatataattcttaataacaaatataaaaggaatgaaagaaacccaattacaactttataaattcatagtaatttttgttgataatattcagcaattgatgttaatcttaattaggtagttcatgattctcaagtatgacccatcaaatgatattcattaattaatgatattatagttgaaaactatcagatattaccttaagcaaatgatcaaattaacatcggggtagcagtaagaaatctcaaggctgtggaactcctcatgtgatgagtgagggcacaataacatttctctgataaacatatgtatgaatatataatacatatataaacatatcacaaaaatgtctaatgtcagtcaagtagggagaaagtgttaggaattactaaatccagaggcattctacaaaatgattagccagttgtgtttaaaagagtcacacttgtaagagaaagaaataccaaagaaatgtttgacaaaatcgagggaacttgaaaaactgagtgcagccgggctgtggtagtgtatgcctttaatccccgcacttgggagggagaggcaggcagatctctatgagttggagaccagcctggtctacaagagctagttgcaggacagcctccaaagccacagagaaaccctgtctcaaaaaaccaaaaagaaaaactgagttcagtgtccaaatatggactgcgttcctgagaaagaaaagacattagtgggaagctagaatgttctatgacatagattagcaaacttaaaccctttacttaaaagtcttaacactggtgtataaaaatgtcaacaataaggaaaagtgagtaatgttatgttggaactagtgtattaattagctttgcagctgtttggtttggattggtttgggtttgcatccaaacctttttaaataacagtaaaataaaataaaataaaataaaaaaccactggtccttcagcctctagcatactcaaacgtcctgtccttagagctgatatggctgtgtggggttcctgaagccaggccaaaatgccagtatacctctcaggcctttcaaggataggaacacaatgccacaacctttgggggactccagtaccagctggttgaaagtgaggatattgccccaagtcttgtggatgtgactttgggcctggatgctcacctggctcagtgcacacaccttcagcttgggctctttagaatccacatgtcatctgggacagtccccacaggcacagctgttttgttctcagtcaggaagcttcatcttttagatcattggggacagagacacaggtggccggctagtgcgactcatcagtaaccttttctgtgcgacctgattgaaggtggagttggtttgtctggccagaaacctgtttggcttgactagcagctataagtcattgttctaggactcccttctccagaaactttctttttttgttgtgatgaaatgtcagctaccatgatagtacctcctgcttggccaggtccgaaagctttgttaatttagttgaaaccttttattctatctttcttttttagctttgtagcttaataaaaaaccaacttatttcataataagcagttgagagatagagagatagatagctatatagagaaaaaagactgtccaagatcaaattcattaacgttttggtactccatgttttccagctgcaagaatataataactgccccatggagaagtgttgaaagttaaacacaaatgtgtatgcaaaggactcagctaatgcttttagtttgtagtgagaccataaaccatcatcaaggccattattggtatggatcattataattctcctcaaaactaagagtttttgtgactgttaaaagcaattctgaccactggagtgtttccaaagggaaccacaatgtctgtctcctcaaaagcacctgccccatggttgaacatctcagtccagatagccctttagtatagctgtagttttcaacattactgtcccccagataattaatggtttctttaaaaagaggtgcttacatcttcttgcctattctaaaaacagtattatatagcaggagatactagttacatgatatacatgagaatatatttacttaatctggtatgcaaaactttgagggttaatttctaacataaaattagaattgttttctgcatgctctttttctttacatcaagtagctaaatatcatcccatcatgtattgatccattgtacttctataattcctcaacctccctaatgctgcaaccattttatacagttcctcgtgtggtagtgactccgaccataaaattatttgcattgctacttcataactgtaattttattatttgggggggttgtttggttggttggttggttggttttagtttggtttgggtttttgagacagggtctctctgaatagccctggctgtcctggaactcattctgtagaccaggctggccaaagagatcttgcagggatttaaggcatatgctactactgcatgacataattttgctactgttatgaatcataaagtaagtatcagtgttttccaatgatcttaggtgaaaggttcaggcattatgctggcctgcccctgttacctggtggaacaggcagtaacctggtcagcccagggttccatgggagctaagtctgcaagcaggtgcagagggcccctttaaaagacagacccctgcccatttacactctctctacacttctccctctactcttctcttgttctctgtttgcttctgcttctcttctctctctctctatggcgaccggccttggtggtcagccattaaccctgtttctcttctcctttagtctccctactctcctgggcctatgataaactggttaatatgtctcatcttgagctcctctttttctttatatctaatttaaacaaaaatctaacattagggaacccctgggaaagggtcactccacccccaaaggagttaagactcacaggttgagaaccattggagtagattcaaaaagtagaagcacttttctcaaagttagggaggctgggaatctgacatcatggtgccaatattatgctcagccttatattgaccatacagtttttctactcatgttccttttgtatcgatcttcattgttcattttccactatttttctccattgctttcaccatttaaagctcaattcctgttcttttaacagcaaacatttaaaaaatgcaacatgcatttgaaaaaaaaaatcaacaaaactttcactgaatcagcatgaggtacctaccatcctgaatgacattcaacaatgaatctgattacctcttcttctctcttaactaagtgatagtcctgttctttattttatatttactaaccagaccatgttatttttgttgttttagacagtttgatccctacattttaacttacatattgtttgtattgtatttcaaattcgggggtatttttgtgggttattggatccttcctatagtctacttttagaagtttaagaagtgagctgtagaagctgaattctgctacatgaactataatgtgttttgtcctaattcttaacccagctgtggaaacagtgctaaatcaagagctgttttcttacagctgaagaatgacagtgtcctagagcttccattgttgttagacacaatcaaattgaagatcccataacattgattgtttcctagagctgctatgacaaatagaaacagaagggatgacttcaaacagagaaagttgtctccatgctctggaggctgaagaaataagaagctgtcagggtcctgttccctgtgaagtctctggaagactatgtattccatgcctttctcctagcttcaggttgctgtccagaaccatcagcttgtagatgtatcacttcgatcttgacatccacgtgtttctgtctctctgcttcttttcttttctaagaacaccagtggtgttgagtttggagacaacctaactccagtatagtgtttttgtgagtcaggagcaatttggcagcttccccccttaattccattatctgctgaaggataagcagacttttgaataaggaataacttcagatttcaaaactgctcagcagtgtaatcctcctaaggacatgttaaaagattaagaatccaaatataagttgaaatttaacttccaatgacagtaattaaattgaggttagaggttggaagagcctgatatagtctaacatcgataaaatatgattcatctagtcagccaataatgtcatgaaaactgacttctctacctgagtccagcaaggttcttttccatgtagctactaagacataccctaatttcataaatgttattgtggagaagaaagaagattaggaggggaattcagagattaaaattgtccaattttaaatgaatatgtctggctttcaagtttagtccagtgtgtgtgtgtgtgtgtgtgtgtgtgtgtgtgtgtgtgtgtgtgcatgtatgtatgtgtatatgtgtgtgtatgtgtgtgcatgtatgtatatgtatgtgtgtgtctgtgtttgcactatcatgcaagtgtatctaaagcagaggcttcttttttaaggatttatttattttatgtgtattggtgttttacctgtatctatgtctctatgaagatatgagattggagctacagacagttgtgagctgccatgtggttgctggaagagcagccagtgctcttaacctctgagccatctctgcagcccaagtcgcagcttcttaagggtctgaaagtagaaattccagtacattttgccttcatgacttgaagaatggtttatagtgagaaaaaaaattaccagcaactctatcaatcttgctgttagacactacatgagtcagcatgctgctccagactttaaaaggtctgtgttctattaaagtcactgtgttctaatgtatttgggaaaggagcaaaatacatgtgtacgttggtacactaggaaagttttactggcacagcaggagtgggtggatatgagtgactgtgtcacatcttgatgacctggttggaaaagactgattctgtaaagaacaaataaaatgttagaaaatagcagtttttctcagacctagcataatctgacaaaggaagaacaattaaacaccattaagtataagtattttcctgtactagtataatacaggaaaatactatactagtatacctgagatagtgctttcactgttccaagtcctgaaatctagagtctggagaccgaaaaggagcaacaatatacttggaagcatttactaagctaagatcaaaagatggtagttatttacttattacctagtcaaatgttttctggccaatgctctatcaccatggtccctcgatttctgtttcttgtgtacaagtatttaaagtttgatttggatgaatatggattttgtggaagttgctttttttttcattaggaactatctaatattcttacgactgtaagattctgaaatactttgtcaggctttccgaacgaagtatgtcatttccttctggaaactacaaaccaatgaacatttgccatcttcacctctgaaaccttcccacgcaggtcctgtcacttctactcatttcagaaatccatcatcatttcagggatcatatgagataatatgggaccagatggtcaccaagacttgcacctaccatgcagccagacacagtggtacatgctcattacctggctcggtgtaggtagaggaaggagaatcaagagttcaaggccaacttcaattacatagtgaatttgagtttgtactccatgagactctgtcaaaaaaaataaacaacaaaaatccccaaatgaaataaacaaaaacccaccaaagacttgaactgcccaatagaagagcagcggggctcatgtcaccatttgaattcattttgagttaactggcgttaaagtaaaaatgcattcttctgtcatcctagctatgtttcaatggcgcagcctcatggtaatcattatcacaacctaggaccatttccagccacataaagttctatcggaaaacactgacaaaacaacatcacttttcctaaaatttatgagcatttcaaagcctttagaagttattatatcttatctagctgaagaaaaaaattctagtgatctaaaagggaaacaaagcctttctacctttctacgtatcaactccaccccattgttttcttggattaaagaatggtctacatggttggcagagccaaatatccaatcaacaggcctcattctgaagggcattctgccttggtttccctctatagcctcgttgtctgctgaagtacgttttgtatgttgatgtgtgaatgctttgacaaacactgttgttcccccactaagcactgttgtgctttgtagtcaccagaaaccattcactaagatctatgtgacaacgcatagtataaagtgatagttggtatctcattaatctaagctgactgttcttcctttttctatcctggcatccttaaataagttaacttcaaagagattcttcaacctttctattattaacaataatgtcctggaaagtatccccatcacaagcactcagctagctcagtgaagtgtcacaagtgtaactggtgtaagctccgcccattttaagaccccttccaagtctcggggtgactcctgtgatttttccttcctttttccttagaaatacccagagccccaactgcttctattttagatcactttgttgtgcctttggaatggaatcacacagtacagggtctctatatacagctggtttctttaattcattaagtctctgcctcaaccacactgctgcgcagatactgttcttcatttgtattggtgtctgctaaggcctgcatggtacaccacggcgtgtctaccctactctacatggacatctgggctgctccattgttatgagcactttcgtaaatttcctttattccattcacctttgctttcattcttgtgggccataccacttaaattcatctattttcatttaaaattaaggttatacaaatataaaatatataaggtttggtgttttgtaaaaagatatagttgccttttcagtactaaatggttgagactgcaacatctctctgtctctttctgtctctgtctctgtctctctttctctctctctctctctctctctctctctctctctctctctctctctctctctctcacctgtaagaattctgcaccttaaataaaaatccagtgactataggcaagcaacaagaaagtctcatatggctgtaagtttctctttttccagtagtccatgccatttatagtcagattaatttgtgtgtgaatatatccaaagatagtgccagttactgggggagaattgggtttcatctcctgtttgtattcagacaggcactcactttgtgggttagcctggaaaaaaaaataaccttagtacttggggaatggaatacaaaggaatgttaagctctttctagtgaaggagaaaaaagggggtgtgggtgggggtaggatgtagggtaaggggaggaggaaaagtggttaagttagtcaggtgtttgtggggtgtgtttaagttaaagagaacgaggtcttttgttctcactgtgatcccattagaaaatgaagagcaagttgattctgggaggaagaggtctaaccttttcagcaggctctcaaaccttccctggaaaatagccattagcaaatctaaagggcagcatgtgtgcaaggagcagcaacagcagttctttggggttccctgcaagcagctagcaagggaagccactgcgggggtagtatctgggatggcttccactccaaacaaactgtgtgtaattcttaccttctatctgagcaagcagaatctaattgggacattcatatctccaatgttcaagcatggctgggattagagttttaaacaaacaaaccaacacagcaccctatattgaattggcatctcttgagatgaggtccaggaattcttgtctgttaggaacccacagcaacttcggataggtagcctattagagcctagctgtaacttttaacattttacatgcatttccaagtcataagtctctacacaaaagagcttgatttgcaaatagatttattttttcatgatttttaaacattataggcttttaattaagttcttgtgggatgcctataaaagttatgacattattatacttgcatgtgattatactttgcttatattctcagctccacactggcctctgttctatgtctccctttctgattcttatggctcttctttctccccacaaatagttagttcctttgctgcttctatgtcatatatgtgctcagagtacacaggacaaagcaagcattggatgaatgtagagtgggtgggagctggaggatccatttggggttttctgagaactcgggctaccacttagtggtcatcaggtaactgctagatgagaaatgaataaaatgagctaatggtacctttactttttgctttctgtgtgctatgtattatttaagaatctatcgcaaatgaggtgagacattatttatcaagcacgtggggagtaggaagtgaccaccaattttagtattgctgcaaatagtgacggagctgtttaattggctggctgatctaagacttttacaaatgatttatctttattatttgttattatgtgtatacatgggagtctgtgtggaggtgtgtgctcatgaggacatgaggacaaacatcttcagaggccagaagagggtgtcaggttgtagagagctgggattacagacagttgttagtgctgtgaactggagtcctctgcaagaacagtatgttctctctcttttttcttccgcctgcctctgcctcccaagtgctgggattaaaggtgtgcaccaccaacacctggcctagtatgtgctcttaaaccactgagtcatctctctacccgccccatctatgatttttaaaaattacctaaatgatttctagacataaagaaactcctgtcttccgtgtctgtactaggcactaaggtagacactagtcatgtgtggcaacaaatttgttaattaaattaggatatttttaacaatttacttcttaatctttactaataacagtttgagctatcaataactacatgtagttagtgctgccatagcgtaagcacagacatatgctattacatttaaattagttatatagtaacatgtttaagactgcaagtgactcttctttgctttctttataagtaaaaatttatataagtcttcttataaagatgataatgacctatgaaattaaagctattattgttaaagaaaattatgcttattaagaaatcttaaataaagcagaaattccactaaataaataacagctaggttttaatgtaatttaggattgctgtagctttgagttacagtatacaaaaagcataactacaggatttgtgttactttaaagtctccacttgagcctgtaaatactttataaaatctttattccaatgcatgtaaatttataggactatttccttaagtccagttaggaaacagttatgtgtgaactacaaaccacccaatgaagattaatggaaccataatgttttgatccatttattctaaagacttaccatatatgtcagtctacagtgaaagcagggaggaatgaggaaatgtcaactgcactcaacaaaagcgttcaagacacatgcaccctacaaacaatattataataggacaaacacttccttaaactttgttatagggttattaaagtttgccttggacaaagaaaacatactttagaaaatctgccttctattgtggatagagctataaagggaaaaaataatttagccatgagagctcaagctagataaaatccggattctatttctactgacttgtctaaagcaagattgcaggagcttgaaatgtcttaggtcagagctggctgccagaaaggttttccacatcagtttgccgtcacccttgttaactccatgttatttttcttcttgtacagaatacagctttactacataagtaaagaggttcagagagttgctagctttgttcctatgcctcactccaaacactagacagactgctgtggcttaaaataccctgccgcctttcttttaggagtgctcttttttcctctttttaggtgggggtccctagagtgtttttgtttagctgtctgttggtgttgttcactcttgaggtggaaataagttgttgctgattttttttttccgtgtctatggacctattgtctttcaaaatctagagaagcaaaaagatctggcttaaatttcctgttgcatttatgccttccaaatctgggttctgtgtatgtgtgtgtgtgtttgtgtgtgtgtgtgtgtgtgtgtgtgtgtgtgtgtgtgtgtgtgtgtgtgtgcgtgcgcgcgcgcgcgtgtgtgtaataggagcaaaagctatcacataccacacattgagagtgttttatctacaggcctggtggacagtgtgttatccagcagtcatctcaactgcagtaggtggtaattaccctagtgtacgcaattgaaagaaggcattgaagtgagtcatataagtaccatgtgctaaaggcagagtttgaatgcagatggagaccaagcttactttgtaacactgtatgtcttccctggaaaataatttccagttcccttcagaagcaacaaatgcctgcaccgctctagcaagtgaaaacatctgcctgccttttctaaaaacgttcgaagaagtcactgaaaacccttctagcactgcatcttgattcttacttcaggtcaattcttaaatcatgaaagaaatcatttttctcatattttaaagacctcatcatgtgattatgtgcttacctacaataggaatgctaaaataaggaaaaatgatgctttatttgtagtaagtgaattacagcagctagaaatagaaatttaatcctagcactcagacagagacagccagacctctgtgagttcaaggtcagcctgatctacatactgagttctaacactgcctgggttatatagaaagaccatttcacccagccacccccccttgctccccaatacataaaaagcagatgaacaagttcatctaaaatttactatggagttcttacatgatgtagtaattccattcctggtttatacccaagagaaggaaaaacacatgtatacagaaatgagctcataagttctcagaacaacactgtttgtgatcgacagagaggaaacagcgtaaaaccattcacttgtgaatggacgaataaaatatgctacattcatacaatgaaatgttgatattgttgctacaatgaagcacagataaatattgaaaagttgacagtaaattgaaattgtcataaaggtcatatcatgtataaatttcatttgtacaaaatgtccagaagttgtctagagtgtatctgtagttttctagggttgaatgaatgagaatgagggtcaccttgcgtgtgtgttgatcaacatagagtttcttcttaaagtgatgaatgtattctaaagttaggttgtcattctggctttttggctctaggaatacagtaaaatccattgcattgtgtactttctttggtaagttttatgacacatagtttgtatagaacaaggatcttttaaattggatattgactagatctatttaagaaaaatacctgttttataaatttctcttaagaaacctgttggcaaggcatatagatacattatcattctaaattttgatttttgttcttgataaactatgaattcacgtgcttagttcttgggggaaaaacagaaacatttatgtacatatatatacagtgaatttcttcttgaaatgataaatttcttctttttctttctttttggcttttttgtttgtttttgttttttgagaaggggtttctttctctgtgtagccctggctgtcccagaaactcactctgtagaccaggctgacctcaaactcagagatctgcttgcctctgcctcacaattgctgagattaaaggcatgtgctaccaccaccctgcaaggtttctatttgtaattaagaatgagtccctgtttgttctgtgttaagtccttgaaattaagactaagttcctatttcttagatttgatataaatggtttgcaaccccatccagatgatgtatattctagttcttccttttcattctatctttctagttatatttaacagtcaactctctcgcccctgtgaacaccttctctctcctattaaagggacttgaagaggccagcaggagctgttttctcaaatcccaatttaggctggcctgtcccaggtgcaccccaaaatacagcttgcctcaattggacaatcacgaatatttggtcttttctcctttcgattcccaggtttaacacaccaaagaacagcagccaagaacctgggccaggccaagggaattgcttgtcaagctgtacaattttgcatcactccatacatcaactaagaggaaactgctaaaatgtattttactgaaaacaatagattatccatcaattaaagatcctgaacaccagcacactttgcacaaaatgctaatcccaaaaatctgtttcctgcaaacctttaaaacccaaagttagttctggaatagtctcaacaggtatgagcaggggtgagtccatgctctcaggtcaccttcccaacctcaccaaggggtctgacatcaccacctggatgtcagtttgaatttaaaactgttgctggaaaggttttaagcccaaccacttaaactcaatgtaaactttcccttaaggaaaatcaaaacgctaatttgcttaattttccaaatgttgatttggttaatttatacccttaattatgtaagattcagagaccctgaaaggcacaaattgcagcatagagttttgagactatttctgatactaggtggatccttcgaccgttcttgttttattggccctgtccttttgtgacttcagaatacttaactgctgttggtggtgattttgttttgcgacagggccatactatatggaccaggttggtctcaagctcactgatccatctgcctgccactgcttcctgagtgttgggattaaaggcatgtgctatcatgctctgctgaaatatttaagacgtgatcttcctctctctcccctgacagaatcatttgtttttcaagtaattttatagaatctttcctaagtatccaatagtttttatagaaatagccttttatacttgtcaatttacctatatcatatcaatattataaaaacaagcacaagcagggtattaacttataataaaacacaattgatgtgatatacatatatataatttcaaatcattgaacataatattaattgaaatagtcatgtacttttgcagcacagtttacatattctgtttacctagacctatgtctgtgactgcacacacacacacacagcatttctctgcatagctctggctgtcctggaacttacttagtagaccaggctggccttgaactcggagatctgcttgcctctgcctcctgagttctgggattaaagcatgcaccatcacagcctggcttcacatctgtatattatagtaatgaataaaattaatagaagttttgggccaaacagttgacataagtataatataggaatgagtagttcttcaatgacagtcatcaaatatcatgtgtgcatataaatcaatatactctatacaagttggaagaatacagctcaatcctattaaatatttaagtggtattcagagacaataactactcttgacaaatcaaaaagaaaagcgagggggtaacaagttggctcagtgagtaaaggcatttgccaccaaaactgactgcccgagttcaatccctgggttccacatggtagaaaagaaacaactcccatgagttgttctctgacttccatatgttcaccccacacacacacacacacacacttgacaaaaagcaaacaaagataggaaataaaaaataacaaggaaatagagaaagagaaagatcatttaattatattttgcttaggatttcggtgatgtgcaggaaacacacacacacacacacacacacacacacacacacacacacacacaaataaaagctaaaaaaaaaaagtttttttgggcattggtggcacacgcctttaatcccagcactcgggaggcagagacagaggcaggcagatctcgttgagttgtaaaccagactgttctgcaagagctagttccaggaaggcctccaaagccacagagaaaccttgtcttgaaaaacaatacaaaaaaaaaaaaaaaaaagaggaaaaaaaagttgttttttgtttgttttgttttttttaaagaggatatagtatttgggctaaatatgtattcaaacattttgagacaattgagctagttaggcaaaacctgtgtgcaggcaggttctgttggctggcaggccaacaagtgaacagttcttgcctgagatacttaacgacagaattttggtagtaaacttactaactattctaaaagttccaacagcatattttcttggttgctgaagagagatgaggcagagaactttccctctcatcactgcctaaaaatggaagtcattttaggtataggcttaaagaaaacagtaaattctaataggcaatttattctatttcattctgcccatatttttagtcatgttgtgtggtactatagtgatctaatgagagaaagtgtgattcttagcatataaagtattattttatgaatgttaatgtgctatgcaaagccgataaagtcccattacattaactcaactgtgttattttttaaattgatacacatttcaaatgctattacagctaatgcttaagacaaagggaattgaaaactgagttattacaaattaattttttctgaggaagattactttggaaccttttcattaaagtccacaagaaacatgtaagcggattccaaatttggtacaagttgcttcatgttaactgcaggcagttaagatgaggtgtgtgcaaaaatggttcatatacttttgcagaattgttgtagaatatttttcatgtaatgacagaattctgatttaaaacagctaattaactaagagaaacacaatgctttggaggaaactgttttcatttctctgtgcccgtaagattatccactctacttccaaaggcagacaacaaattaactttgtagattaaaaaaatcaacttttctgacaatctgatcattctaaatgtctttaaatgttatacatattggattacacaaaagagtcaaagatttagtgtattttattcaaccatcagaatatttacttacctttaggccttaaatcggttataaagaaatatctgagtactcttatcatagtatttactatttacctggtgtgttttcttttactttttgatagtgtgaccttgtctctaaaagaatttcaaacaagggttacactctggccctggacacatggggaagggcccaggacaagcacaggaagatttggtggactttgcagagcccccgttgagggccctaccctgcctggggagtggtgggtggatagtgggggtggggggtgggggaggagggatggagtgaggggagggagagggagaagggacttacatgtgaaacaagcttgttccctaactagaactaataaataaattaaaaaaaaaaaaagaatttcaaacaagcaaacttttgagtgcataaacatacataaaaacattaggtcttattattagatctaaaataaatataaaagcatactatacatcaatactatatacccaaatagtacttattattgacagatagctttattaataatttatattaacattaataacaacactaataattccctcaatataaatctccttggttgtagagaaacatacttcaaacagaaaggtctatttagggaccggctgagtaaagaaaccagacattcttagtgagaaaacttagatgggactgtcaactcagttgtcctgctgcagtaggtgtctgcttataactgtcctaagacctgacacaccataggaaatgaggtgctgtaggcttccttaatgccctgtcatactatggaaaagcaagccataacacacattttaaaaaatgcctttccaccactaaaattccagtcatatgcaatttcacttagattagccgaccttctccagatccacatcagtatctatcttattccaaacttagaaaccttagaaaatccatttgcttaacaatcatcagtaataggggaagaagaggcaattgggaaggcagccaccagtgaaattcgatcattatataaagcatgtactacctgagaatgggaaaccctaaaacaacctcggtaatagtataacattccaacaccttcagaacacatttgtgtgctagtttgaattattctcctataaaggaatcaagtccctttattttatcaataccagaatctgtaagttgttagaaatgagaaactattttgttttatcacagtgaaggcaattgctttttattttgaattcaattttttttttttttttttttttaatacaggagctaatgtggccctggatggacacaaacttcttattctcctgcctccacctccctttggagatcacaggcactttcttctaatttgtatcttaatgcaaatagtattataattcatttggttatctcagtaccttggggacaatgaaaataattttcttcatgttttacccatccctttcatgtttcttttactacagtctatacaagagggagtaaggcacttctcatgtcccctatttgctgtctataagtacaagttgggggctgtgggggtagaagaaaacaaatggtgtcggtgcttgagaagcctgaaaggtgatcctggagcacagtgttctaagaggaacacccattatgtaatgtggaaggtatcacccacatgccactgctgctgatgacactggagtggcatagtcctcacaggattccagctgttgaaccacatatacaataaagagatttccaccaatttccttattttacttttttcactacatgtatgtatctcttaaaaaacaggcatttcccaatgtattaagtgaaattaaacatacaaaataccttaatcatacaacttttttatttaagctttattaaacagtacagagactttcttataacaaacactgttttgattagtcagtgagaagtttggggttagcaactacaattttaaaagaaacaagcaattggaattagccagaactagcacaaaagtacgaacactaatccactccagcagagaggaggcagaggaaacacaggaagcttaacactagcacagaacaactaaatcgtaggaaaatagcctagggatgaaaactttgtacacttaaaattcaagaactctgcaaggggacaaccctttgtgtcagctctccctaagggttactctttgctcagcagctgggtgtttattaacctacagaggaaggtcacttggccatatgggagcttgtgcttcttttgttaactgaatataacacaatgtctaggtgccacacactcaaagctaaaacaagataatagctctaaaggacacataataaactccacattccttattttaaaatatatcttataggaatgtgtattatgaccaaatggcttttatgtaagatataaaatattaagttaactgagcatagctgtcggtctacatgggccccagttctagtaagatgtaggaaagtagttattgaaagtaatcaaactgtaagacatgtcaaaatgtcaagactaagatttctaacttcctgtcaaccaaatggattgcatccatatggtgagcggtttattgagaacctgggagagttactgaatgaaacccccactactcaagaaagcctgactccttttctgactgattcttttagatgatgtcagaaaattactcacaaccagacttggggcttaagatttttctgtttttctttttgagctatgcattaagcaataacttgagtctcatcaggagacttatatgtaactcagttcacactacaactgtcctgcaaaaccaccacagttgggaccaggcaaggatactaatagtttcagaagggtcagatagatcaatgaggcatcatcttgagttttcccataagagctctaaggaaaaaaaaaaaaaaaaaaaaaaaaaaaactctattgctacaaattttaccacagactattagctctaatgtttcaaaaaataactaaaatattaaccttaatacggtactctattgcctttaaaatagaattaagtgtttcggttttccaaaaaaagtgtatcttcacagtttgacattcagttcaatatacagccaaaaatctttaaactatcaatattgtaacaggccactttcaattttaatgtagttcccagtttactcaatatttataaaatacagctaacagagtgcagacatgttattattgctgtatcttcctataccaccttatttggtatgctgtcctcatttccagggtttctagtggagttaagtgacaaagtgaataggcccactccctccactccctatcctcaatcaaaaagaaaaaggaaaacagaaagtaaaaagactagaaataggactaaggtccagggagagggcaaccttcaatcattaaagtatgggaacacagaagacagctttttgcaccacttttcatgccacacaataaacactgaagggataactaagtacttcctaaccaaaagcctttcaagaagcaccagtggatttctggatctgttcctttaaaatcaagatactctgcctttgctcgggaggcagcatggcaatctgatctgcagtcagctgaagaacctgcatgatcaaagctgctttttcctgatcttgtggagttacctgactttgcccagggctaaaactgctaggctggcctccaccttgcttactcgatccttgtatccctgcttgcatgcctgctccctgcatccccgcttgcatgccagctccctgcatccctgcttgcatgccagctccctgcatccctgcttgcatgccagctccctgcatccctgcttgcatgcctgctccctgcatccctgcttgcatgcctgccccttgcatgcttgctccttgcattcctcctccttgtatacctgctccctgcatccctgctccttgtatgcctgccccctgcataccacctccaggatttcccactcctgcaatgtttggaacctgtctaggtccctgagggccacctgcccccatattaatggggccaggaccctggattccaccagtcatcgggcctctggaactagggccagggcccctcatctctagtcctcttgcttccatccctctggtctccattgcgcaggtctccattcttctctccattcctcgtggctccaagacctcggtttccatgggtcgagtctccattcctcgagactctctacctcctctaccatccataggtagacctctttgatctatcatgggacctctgggctctccaattagcattctgggatctgctgctaatggtcctcctctcatgtcatgcgaggaagggccacggctgtcatgaccatggtgcatagggggaccttggtggggtgggcccatataacctctgggttctacttctccggtaactgagagcaaagtccctccgcgtgggtcatttggagcatctcccagtagtcctcgaggaggaatgccaccagaaggcatgggtccacgaggcattggaggtctaggatctgacatctgcatttgtcctcgctctaagggcactggcatgccaacctgtggctgcattgctcctgctggagttaaggaaccaggtccaggtccgggaactgcggctggtattggtcccggagctggaattcctccttgtatagaagtctgcatcagaggaggaatgtccttcacaggtcttcttggcagatgttgaggctgtggggctggaggattctgttggttcagcataacattgggtcccgggcagagcccaggggcagtggcagggccagggccagagccggggccagggccaggaccacctgggccagggccagggccaggctgagatttgcctgggatcagtggtgtgacatgtatcttgcgatgcaaaattttcagtgcaatctctggatccatgatcctcatcaccacctgggcctgcagcagggcatacgccagttgtgggttctgaagcagcatgttccgcgcttcctggtggctgttttggacacacaacttcatttgcttcatcagctcaaacatctgctccgggggcaggctggcgactgctctcgtaatcgactctggagcatcttctggatcaatcgggtccccatagggggagtcgatgatgggcgctgccgggcccaagctctttaactcctccttgttcttttcactggcagcattgtccacccgaagcgctctcccactaaattcgcgcccattgaggttccgcatggcactaagcgccgtctcctggtcttggtactcgcagaagccataacccttgggctttcctgtctctctatcgtatacgagacggaaactgacaaccgaaccaacctccgagaaaatgtcctttaactgctcctccgtcgcctcatacgggatgttccccacgaacactgagcgcagtgaacgatccatggctgggtctctcaccgccaaactcgacatgattccggtcgagcacacagcggagagcaaatccgtccaagagccgtcctctggcgagccaaccacacttcccctgtgtaacggaagcaggtgtcaaactccggggagaaacctttccgctataagtccatagttccgctaggccgcagaaaccgcttcctaagaccggactaatttatctaacgccttccgcctccggtcgcgcgctcttctgtccgcgcctggttactgacagcgtgtttcctctccatgatcttattggtcaaatttctccggcgtcccgccccctcttcctgccgtcaccggatgcattagaactgaccacattaaagatggccgaccgggcttcactgtggtaaccgtagcgtcggccttcccagagggatggggcggtttttctttgcgttccacgagcgggaaaccgccaaacgaaagctgatttaaggcttaatgtttaaatttctgatccatgtgttttcacagatgcttccgtttagtgtagaatgtttgaaagatttaaaattttgttccagattatgaggtaaaatgttgatacctgtaccttaatattaaaacacctccttaaatatcaataaaagaaaattaatgcccagggagacaaactaaagcgtctgtcagcttcagccccgcccccacgctatggcttgttgaaactgttataagatgcaggatcctttcaggtttttctctgtgtgctcaggcaaagtgctcattcctctacttactaatattatgctaaattggaattaattgaaaagtatggccgagagtatagatttaatcgaattaatttaacttttattgtggacatttaggtagttttgatttttaagttgttctctttgtattttattttgagttacggtctctatgacgtggagtctgtatagtcctgtgctctcctgaagttcatgatcaggctggccgtaaactcacagagatccacctgctgcctgcttctgcctctggagagtgctgagattaaaggcatgctccaccactggttttgttgtccttgttgttgttttggggggtttttagacaaggtttctctgtgtagccttggctgtcctggaacactctccatagaccagcctggcctccactcacagagatccgcctgcctctgcctcccgagtgctgggattaaaggcgtgcaccaccacttgcccagcagcatatgttttatatttggttgtgaatttattcaacaaatcaagatatcaggttactaaaattagttttgctgtcttaacacagggctcctcttcagaccaggttggctaggaattcactatgtatgtagttcaaatggtcctccaatttgcagtcctcctgtatgccccagatgctgggattagaggcaagcaccacaaaccttgttcttacctgactgattttcaaagaaaaagacatgaatcaagcaaaacatctaaggcctatgggattatccttcacacttatcactgttaaagtttggtccattgtagtaatggtttttatgctaactctgaaattgttctgagcatccatgtatcaatcatactaggaaataagtgccttagctaaaaacataggcattttcaacaaacaggattgaccaacaaaatcacccaaatctctgacagatttgaggggaaaatatggtatttacagcagggtggtcacacaggtctggaattaccagcacttgggggcctaagacaggatgatcctcattgtgatttcaaggatagcaagggttacatactgagttgtaggccaatctgtgatacatgtaagccctccctccccaaatggtttttagttatttctagaaattaaaatttacacaaaactgtagaaactatattctctgtgggtctataaatggtattaaaatattaaatgaaagattcacaataaactgggcatgctggctcacacctttaatccctgcatttgagatacttccaggacagcctggtgtaactagctccaggctagtcatgactacacagtgagacccttaaaaaaataattttaaaaaggattcactatagattaagtagataaatactagatatagttttaaaatactatgaatagtttcaggcactttttacccttcattctgagaattgacttgaggacctgaaacctaacactaaattataatcccagctctaggcccagagtcacctttttatttgtcttggtctctcaaagaatagccaaacagtccacaaaaatttctctagtctctccctcatcctgtaggctaaaaataattcattttcccttagatacaaccaattttttaatctggaccttcctgctggtagtaattcgttttaccttttagtagaattatgatttgcatctataaaataactcaacgaaatatgtaggtctttttatccattggccatctgcctcatatttctcattccataaatacctttccaggcactgtcaatacggcactgtgaaaacatatttgttaggacaatttctctgcatgagttttgtgtactattgcaccaaacccaccagtaaataaacatctttaaataaaacaaacaccaaaaacaaagtttttcatatctcccatatcagaaacacagaaatgtgtttcgctaatgcctaaggataattttaatgcaggccatagttgaaaagctactccactacaaggagacaaccataacacacacacacacacacacacacacacacacacacacacacacacacacacacacacagtattgacatgtatagatgaggtgtttcattttgttttcaccagtgtatcctccgcccctagggtaaagctgactctgtggagttcccattatttcatttgttaaatggatgattcaaagtatctttagagtttgagaattaacaaacaaattaacttggaaagaaacaagtgacattaaataacacagtccaggttctaaagggctgctgccaggcctttattttattcctattcttttatttctaggttgataaaaattcttccaggatactacttttagaattggatacttgatgaagtatctagaaatggaataaagtaatctagaaagatctggattcctaaagaaggcttcctagtagaagtggtattgggagatggttcacagtctattgtagataaatggacatgaagcaattcaggcagcagctacaattggccaaggtgtaaaattgagactttgtattttttatgacctagaagcaagctaaaatgtctggttactgtaagacaggataggccataaaatttctgaatattaaaatcatgaaaacagttgagtcagcatacttctgtttctcctgctgaaaatgaagatagactaatagcagaggctcaggaacaccaatctcatcacattagctttctgcctgagctacccttttttcacctacatgtggcatctggccttcctattttaacatcctctaatgtgtcttcatttttactactcatccttcatcactctgtactttcctctggccacctgtacccttcccttttcatcttatgcagtctgagcttttctacccctggcttctgcccatgctgcccctctattcatgacactcctttttgcccacttcccagtccaccacatttaagttcttgttcttcagtgttcatttcaggatctttcctgctagaagcacaatacaaatttggtggccatgtattagaggtgtcttcagtagataatggcagtgtctcgataaatagctaattggaattagacacagagatattaatgagtttgtctaactatcacaggcaacagttttatgcatgccacttgaataaaaaaaaagtcaaccttgaaaatgattattctacccaaggaatggcccacacatagacagtaagaggcaaaaactacagcctgaaaccagatctcctaaaagtaagcttcctattgctcaattagtctagtagtcatgggttactgaggcctggacacagcctccattggcctttttcctgattacctctgagtgttactaattgcaattttgacatgacagtcagtgctatggcaacagagggactgtaagtgtaaggactgaatcagttgagaaaaatgtttccctttttcaattgatggggccaacacaaaccctcacagaaagcttttttagaaatattcagtcacataggtaattaattcatttctgaaacaaagcctggatttctcaggccccaaattaagctgatctgagagatgtttccccaaaatttgtaacacatttactatgaaatgaccgtagagggaagtgaatagtaaattcctttcgcttatgattcacttttgttggaaaggaaaacattacataaatctggggctctgagcatataccactacacagctacaagttaaatggagccaaatgttgtgttgtctaacaccagtctgttgataggttaaggaagtgagacaggaggaaagcaaaggcctgtaccagaattaactgccaacttattggcatcttttatatggggtctagatctttagtgtatgccatgcaaacagtgttcccaggttcccaggatgaagggggtttgatttcagactttaatcttagactcgaggtgacaagaaatcatgtgatcttggacaaattaggtccattttggcatctttcaaatgagaatactatccctgtgttggattgttgtgtagaatacataacacttattttatcatttctcatattgtattattaatctgcagctttgtataatggtagtatgcacagcagaattttaagtgggaagaggtacaagccttccttattctaatgctggttttttgtttgtttgagacaggggttctctgtgtaacagctctgactgtcttggaattagctctgtagaccaggctggcctcaaacttacagaggtgtatctgcctgcctctgcctctcagtggtggcatgtgtcaccacgtctgacagatcattttaaacatatatgcagtcaactttaggaagcataacagccaattgttgttctaagatgtacatttgtagctgaacatgattcattttcaggttcagtgccataggacacttggagttttgctagtcatattggtgtctatgaggttcttttagtgaaccataatatactctcttcaaatatctggttacctgcaattccattcagtccttttcattacatgggtgtggggagacaccctagccccacccaatagtcctgggacaggtacctggtggacccgggactcgcccataagggcgtggtgaaggaaagccaagatgacaagatgacgtaagggaagcttcttaaagactgcacgtggagaccctagccccttctttctggccgtgcttgctgggttcctgtgacctcgctctggcctgcgttttgccctggtgctttcttgaataaagagattttaccatcatggattacagttcatctttgagcgcacgctgcaacccttgatcttcacatgggcttgtgtgaactttggcaatggattgagtgcacagactcctgtttgaagggcagggccatgttccaactgttcttaagaaagctgctttagagcagacactgccagatacccaggtattcaatcattggaagatggaattggacaagaagcagaactccccattgttgctttgagctgtcacctgagagaatacagagaaagcaaggagcctcatagctatggaaaagtcaacgttccacatttggagccgaataaagagaacttacttaagaggaacaattcatggatctttttaaattgtattattttctgtgaccagaataatcaaatacccaagttcagagcaatgtctgtactacagttctcttcatcaattggggtagcatttcccttttgatgtactgtgagcctaaggaggaacctatcatggacccccatgtttatgggaacactttctgaagcacttggttgggggtcagaattaaaaacatcaccaataaaacaacagtgtgacaatgtgttttggactccttgttacaattgaatgcttctccaaaaagattacttcagaggtgtcagtttaaatttgtcatattacactagaatcctacaagttagaaattatgttaaaatgtaaaatgtagtgtatatgggagtcacagcaagtactccgtggtgcaagtacagagaccaactacagctacagaaagaagtaacactagggcttattttaatactatcttgtgacctgtcataatgcagagaccacatcagcctggtagggatgccatgataaaagaccacacatggggtggcttaaagaacagaatattttcctgcataatattaaaatgccagcagccttgcattctcctgagattgcccttgctctgtgtcctcaacctggcctttctgctgggtagaaagagctctggagttgctcccttaaaagacattacatcagattagattagattagattagatctctgtgcttttggccacatttaaccttacttattgctaagccctaacatgaggtatagtcacagtaggtattaggtcttcaagtgtcaaacggggcgctcacaaataagttcataacaggcaatgatgttgatatgttcgagaaaagaagagaaggaataagtgttttcaggttttcttgatactctgttccatctcccagcccccagtctgtgtgcaggtgtatgtttgtgtgtgtgtgtttgtgtgtatatgactgtgtgtatattaatgtgtatatgtatgcatgcttgtgtgtatatgtgggtgtgtattgtccttcttcccacactcttttctttgcacatttgtactggtccttctgtgtagaagacctggatctctctgttttctcttctttgttcatttctgtttcagttctttgggggagaacttaaataccaagttttctctgatgtctactattagttcggtatggcaaagagggtctgcaagagagctcagacaatgcttgaagtaccaggagttaatgtcccttatctatggggtcacagagaggtccagggcaggagctgggattcagagtggcacctattatcaaatacagattttcaattaatttgagtatcagttcagtagcactggtaaagcctgaatcctggtggaccatggattccaaaagtaattgttgtcaaacatcagtaactccatacatgaaggcaaagcacccatacacataaaataaaagattttaaaaatgtttaatgcatagtgtatgatcttcagaaaacacacactgtatgtaatttatgactttattgaagttgagtatgcatttaaaaccctgcactttccatctttcatataaaaagactgacaactctattcttggcagtttaaggacacaacagtgaacagtgacaatgattccattattagcatctttggcacagtctggtgacatttaggttgaaatagctgtgcctactttctcacctggcagtacaatggagaatgtcttctccttggcttccaggtgtttgccaattccctccaggttctaggaaacaaaacaaatccctgcagggaaagcaggaagtgcaaatgacctattcctcccttgcttaatcttttgttagtcctgaaaaaggagttgtgtgtgttagcctgaggtcccgaggagccagaagagaagtggatgcctgcagggaggatgaaaacagaagtgtgaaatctcccctgcctattcagtggtttgcagtctgctgttcaggttccaggactgggtaattgttgccattcattgtcaccagcaagatttcctcattgtcaccagccaggttccaaggaatcctcctgagagcaggtatctgcagacagggaggtggagatggggaaaggcaggaaatgcttgcactcccatgcctaggaaaagtgatttgaagcattttggttagggcctgagaaaccctcagggtgccactgttctgaagcacttgtaaacactaaatgaactcactctatgtgggacgcaagtacccagtggccccttaggtatgagccaaaatgcagcattcatgagaagtttctccttgagttttctctccgatttgcattgagaatttataatctgcagattcaagtttgtagcagaggaacagctgtaccggtgagaacctcccattctgccaagacaggatgggagtagacagtttccaaatggaattgtgatttgtttgacttccctagaggtgtacagaaaatgaaaacggaactgctgggtatctggtgactcttgctcaggtgaaaatgaaaaggaatctctttcctttatcgttcaacaaagcactgtgacttttctttgtcaccctagtaatccaatgtcacatatcccgatggtcactgatgacttccccccttgaagccagggcaaatgtgatggcgcctggcacttcccactacttgaacagagaacttatgaactctcttgattttacctcaggaggattggtagttcatgaccagactctaatacagagtaagaacattcctcaagaacaaaaagaaaccaataaacacacatggaagctagctgggtgtgatggtactcttgtaatctcagtactggaggcagaagtggataagtaccaggctacacagtaagttggggttcatatgggcaggggtatatagcaatggtctcttctcttccttcttctcttcccctcctctgcctctgattttatgacttatttgaagggagaacactgggggaatggtaaaagtgattttattgcttctggtttttgtttgttttttggtgtgtgtgtgtgtgtgtgtgtgtgtgtgtgtgtgtgtgtgtgtgtgtgtgccactgtgctgtattttcaggtagtatgttctggaccctgcttagtcaaaataataactggaaaattaggactttgatctagtatataacagtctcattgcacaactgtcttgtaaaataggctctaaacactggttaatattcttccttggacctgattgatgtgaaattgaatgattcttattagaatgtcagtgaacatggtgggttaagtgctctcctcataattggttggtcctaacactactatcatgaggacttaggagtggcagatgagcaagctgagtcatgcttaggtgactttgcccatggtgaaacatctaagagacagagttggatatgtttgtgagcagttcctctaaaggaaactgaaatcctgaaataaaaatctaagttgctttaaaaaaaataataaatgtgaggttctctctccaaggaaaaattctgttaaatttcactagcagccaattttgctaccatttcttgccttatcagctgcttctctgtttgttagaaaaagaaaatgcagcatgaaactgatggggagaaactgtgaaatcagtgaccacaggacagagccctgaaaagctctagcaaaaggttggttttgtcatttatactaaggcactgaaactggctgccagtagcacaagtgatttaatagacaccatttaggtaatatattattttgccaagaaaattcattgccacaagttccttcctaagctttggtggctgcttacttaacaaaacagactgcctgggaactgtaaattattccacagaggggaaaagtagatcagagatggctattaatttaagctgtttcctattgaagctgtcatgccaatgaaagaaatgcgtattggctaaaatatgtgactgtttggtaaaaagaaatacataaaatggcaagtctcatgtttggaagttgaaaagacattagttacaaatagggtattaaaatggattcagtgttttctaactttaaagctggaatgacaaatgagaaagcattctgtagactggaaaacagtgtacacaccaggcttgtgtagatctatgtaacacaaaggattgtgctctgtgtattagaatagggtcagctggccagggatttcactatctgtctcaaaaaaagacaagcaaaccgtgtttagaatcccaaatgttacgaagaatctagaaaagagctacttcaagctcagagttcagtgttcattgttattttcatgtcttgctcttacattatgcttagcatatgggtggggtaaaaatgaagctacagaccccacatatacaccgtgggagatgcagtcatccttaagcaggggaccaaggtgtgtgtacaacagagagggggtaaaaggaagagaaatgattaaaaggatgtgttttagaggaaggagcatctctctctctctccctgaaaaatagaacacatacaagaggcaaggaaatggtagagagatagtgtgacaaaccctaaagaatggcagatataccagggaatggccaggtcaccttcctgtagtcacagagagactgaaccatctcttttctattctaaagttggatcaatagttctgatactttggaaggtatactggttgttttatcaacttagcacagggtagacatatctcggaagagggaatctttttggtttttctatttacttgtttgtttgagacagggtctctctatgtagccctggcttgtcctggagtttgctatgtagaccaggctggcctcaaactcatagagatccactttcccctacctccaggctgctggaattaaagatgtaccttcacagccagctggaaaggaaatgttaattgagaaaatgcccccattaagattgacctataagcaagcctgcaggcattttcttgattgatgactgatgtggaagggcccagcacatggtgggtgttgctaccccagggcaggttggttttaagttgcattagaaagcaggttgaacaagcctgaggagcaagtcggtaggttcctccacagcctctacttcaatcgctgcttccaagctcccgccttgagttctggccctcaatccatggatgatgcaaggcaagttataaaatgaaataagccctctcctatccaagttgcttttggccatggtgttttattacagcaatagagagcccaagacagaaggttttatttgttgcttgtagtcataaaacactggcaaacaaaatcctatcagcaatcaatcagagaagtagttgtgtttattgatattgcatattataaaaataaactttcttttgtataattccatgtacattttttttatttttaaattcgaaacaagcccccacagaccccctatcccatcccctttctgctccccagggagggtgaggccctccatgggggaatcctcaaagtccatcacatcacctggagcagggcccagaccctcccccatgtgtctaggctggaagagcatccctccatgtagactgggctcccaaagtccattcctgcaccagggacaaacactgatccactactagatgccccatagattaaccagacctccaaattgacatccttattcagggggtctggaacagtcctatgctggtttcccagctatcagtctggggtccatgagtaaccccctcttcaggtcagctgtttctgtgagtctctccaggctggccttgacccctctgctcatcactcccccctctctgcaccatgcacatgtttttaaaatgagagaaacccatatgtgttcctgtagatatatttcaataagaagagtaatgggcaggatactgttgttatataacccagtcttttttttttttttttttttttttttgtttttcaagacagggtttctctgtggctttggaggctgtcctggaactagctcttgtagaccaggctggacttgaactcacagagatccacctgcctctgcctcccaagtgctgggattaaaggtgtgtgccaccaccgcccggctcagtctttttttttttttttatcccaaccttacagcagtatgcttatatgctcttagatgcttgtatgggctgttgcttagtaggttcataaaaatttcacaaatgtgtctcagatgcttgtaaaagcagtgagactagaacacaggtcagtagagaggtttatttttgtgacatgtttttttattgctgctagactgtatttactgtattctttatccagcaccctcaaagtgtttcattacttgttttagagcatattttaaagttactagattagttactattacagttaaagctactattttagaaatactcttgtaagaagtcatcgtagtttagatacttgggtctcccctaggaacattactgggaaaactcaatacagagtcttgaatttgtgtttgttatgtacatctaaagtcaagccctcaggaagtctgcagatttcactcttcgagaaacaccgtttgaaaacctttgctattattgtatttatgtggaggcatccctgtgtttgatgtcactgctcaatggaatcattggtaatccaacaatctatgacatgaacagatgttgtaataaaagcaatgttacctttgctgtgagctgttttagattctttatcttcttgttttctcatatttaaatgaagtgggcattacatccactggatttagctagactctagagggtttcttatgctctttccaaatgttgctgcctatgaacatagcggctttgccctgtggctggtgaacatctcctattgatactgtctgataatctttactcttcagagtgaggtgctcttatggctacatctcccggtgaataagacacacctctttgtctcttttcctatcacttcctgtcctgactgttctcttctgtttcaatctccagccctgatggaattggagggaatttgcctactgcaacttctgtccacaattagaacttcaatggggctattaggcagaaaagtggctcttccactttgcatccaggcttcttgtcattgcctcagagaatatttgatgacatgtttttttttttttaaacttacagtgaaataatattctctgcctatcaaaatccatgttgcaaaacaagccatgcttctgtgtactcaccataatgtctctgtgtggtctcttcatattctgaggcctaaacaattgtacatgatctacaacattctacttagtcactgggaaacaagctgcctggtcacttatcaggacaaagtcagcatttccagaacaaatgtgtggataacctcttgttttctaggtgtttccttaaaagggatggtgaaacaagtatattatctatttctgggccattattgtcatttattaatctgcttgctcaggttccattcttccacctgtttcataaaaatcgtaactaaagatgagtctgaagaaccctaaaatgtggatattcagctatggagcttgctcatttagcagccttcatatgatgaaggatggccacattttgtgattttgggctatgctaacagcaactaattgaatattaaccatgactgtacatgaaagtatacaggctttgattaagaatacctttctttggggaccttatttgttcaaagcaaaagtataaaacaaaacaactccaaatctcaaatttccaactattttttgattaaatagctcaggacaatttcacattcttgaaagctaattctaagctggcagttccattgtggagtgggaggaaaatccatctggctagtctccactagtgaggcaccatgaatctaagtaggcaaatgaaaaaagaaacaatgagcataataaaatatatgaacttccagaacaagacaagttcagggcatttgtattggtcaataacagttccacccaaaaaagcttccagaggacattcttgacactcaaagaatggccaagacctaacttgagtaagaagagattgagaatattctaggcagcgagacagactgtgtgattgtaatcccatcactcaggcgatagaggcagggagcaagctaatctagatgccagcatgtgtcatgtagcctgagctatacagagacacaaactatttatatttcctgtattgaagaatgtacaagccagggttaaagcaagcctggcattacaagcagactggacacttctagatacaggcctgagatattagacttcgtaacacacagtatgagtaggaaggatggaaaagctgaacatccacactgttgtgtcgactgtcttcctaccactttcacacctcttaatgtcagatctctactcacaaagaccaaaggcttacggtggacctaaaacagagctttattgccagatttctcattactttttcctgttgtcattttttaaagtaattgtaggacagactttgttaacaatactgatttctgccaatgtaggcttcctatccttttgggagcagaggaggagtggcaggccctatgaatgcattaggggcagcaggattcctactggttcttcccataaacatgagagtactctgaaacaaattgctttcatctgaaaataagacagaattatgtggaaggaagcagatggaagacacaccacatgtaactcttcttgctggctctccatccacactctcttttcattcctgagtgtgcatgagatcagagcaatagattaagaacattttcagcagcagagatgactgggaagccaaggaaaccatttgtcaaagtaaatgaggggacacagaaacaggagggcagctaattactttttaaacctagtactgatagaatacacaggcaccttttggtttagttataaattgaagcaggagacttgatggttgttaaaaaataaaaagggaaacatctttagaaatgaaaagataacaagcctatgatcaataccgtgggcagccaattacaagctattatgtctctgaaatttcaagttttcattgctccctgccttaactgttagtaatattgtctttgaccatctttccgtcttaggagtgtttggtttctccttcattgtttgtgcatacattcatcagaatgtattatctcagccaggcattggtggcacatgtatttaatgccagcactcaggaggcagaggcagaggcaggcggatctctgtgagttcaaggccaacctggtctacagagtgagttccaggacaacctccaaagcaaagacacagaaaccctgtctggaaaaacaaacaaacaaacaaaaagcaaacaaaacaaaacaaataacaaaaaattgttatctctgatgcccgaggtactggttgggagggctagggcatggtgataagttcctgttctttttgttttaagacagggactctatgtagccctcactgtcctggaactcactgatctcaaactcactgagatccttctgttctgtctcctgagtgttgggatcagaggtatgcaggcaaatatcatgtgaagggtttcttcagtgcatgaaccttgcattttccaataacatctgctactcttactgaattgatatattgtcatcacaatcataaacttttcctatcatttcaatttgtctatgtgaaataccaactccatcaaccatatatgctttactgaatttccactctgtaatttataagcatgtaatttgacatgatatattttttcaaaggctactccaatgataagtctttctgtcaagccgcctgagccccgctgcaatatgggtgcccaaaataacatacagagtcttatattaggtacaatgctgtggccaatgactaagatttcttatttcctagctctgtcttaagtaccgtaactattaaactatatattttttataaacgtattttattgagaacactggcagaatgcgttctgtcttcctggggatcacttggcgactatccctctactacatttcccagaatcctcctcgattcctaatcccatctatcttgctttcctattggccaacagtgctttattcatcaaccaataaaacaaacatatacacacccccatcaggctacctttttatttcttagagtgccatttagctgtaagcacacactttttgccttgccttcctatggacaggattatactttagagttttaatatcaatgcaaccactactattaaattattaatgacatcattttcagttatggctgtttgccatcagaaggtcctaaaaagtttcatgtgacttttattattagaactcaagctataactattcacttttcttttcaagagtagcatgcctactttatctggtgtggagaatgtaaaacataattcctaccctcaaggaatttactgcataactacatttattttatgttaatattcactacttattcttctttatcatttgtaacaaactgatgttatagagaggattgtgcttgttatgtctttatagcaaagaaagcatttaaattcaggcacttttgatcattgaaatactcatgcttcatggcaaaccatatatttgcttggttgttgttatttcctggcaaggtgtttatgtagacctggaagcctacaattggctatgttgaccaggctggccttgaactatctgagatccagaaagaaagaaagaaagaaagaaagaaagaaagaaagaaagaaagaaggaaggaaaggaaaagagagaagtatagtcatctttctagttctacctgtatttttctaatgttgactgtttaggttgcaaaaacattcagaggcataataataaaaattatgtttcatctttataagacaactttgaaagttcagtcccatccaaatatcagcagttatgggtaagtaaataggtaaagtcctgctgcctgttgtctccccttgtacaaatgaatgtgtggtggaacatagcactctggaccacattcagaagttattcctttcctgaaagtatgcatcagttttgacttctctttgagaaaagctaaatattgacttgcttaaattgatatttgttataatggtcaccataccaatggacatgtctgaagggaggatataccaaggtaatagttctgaggatgtgaggtgagagttttctgtagttacctgatagttagggattctgtatgtgatttacatctgggattctattgtaatcaatgctctgctttgcctagttcgtagcaatttctctgagttgagcatggaattctattcacttcagtgtttgccttatgtcattaatatagaaatgtatatcatatgagggaagcccatacagtaacaaaaagtaagacttccctacttgttagctcatttcttgacagtaattcaacagcctgataggtggctataagattcatatagcctggcagtgaatggataaatgactgtttaagcttgcattattaaacattttaaaatgaatagttccagaaaagtagcctatttaatatgttgagacctaaaatagtattcattagtatgtatttgctacaggatttcctgcccggttctgcagctgtcttgccccaaatgaacactcagagacttgtattaattgcagtactgtttgccggtgaccagggtttcttattggctagctctgtctcacttattaactcattactaagccacgtggtcttgtcttaccagagaacacctgatgcctcctctcttccggggctcacctcacaactccttcctgtctgcacttcccagaattctcctccgctggtagccccgtctatcctttcctgcctggccactagccacacagtgttttattcatcaaccaataagagaaacatatacacagaaggacaaccccatcatatattcagtgacatggcagcccagttagcaccttaatttaaaagagggtcatgtgccttacaggtaactaaccagctggttccaaattgccagatgtagcaaaacgaaaagcacgggcattggttcgccctctctgtaagctggacatcttgttctgatgaatggttgactttcatcctacttcaataatgctactttttaagtttcaaatttaaactcaacagaaggaaaagaaaggttgtttatacaaaatgtcctttcccatctgtggtatggtttacacgggaagctgtctgtgaaactgctgaatgtcattcacagatcactgatatatattaagttgtttttcttttttttaatccccatatggaaaagtgctaaataattgatcatttgtttctttttgcatatgtgccaattaaaacattgtctgtggtacctcacgtgattaaaatacttaaaaaataagttggagtcacatttggatggctcatacctataatagcattgcctgagaagccaaggcaggaggagtgctgtgagttgtaggctagcttaggcaataacatgagatctgtccccgctcctcaaaaatagatgaaattggaaactattataaattgatgctttgcaaacagaaaaaaatcacacctcaaaaatattttgggtttgagaaaggtggtagaattaccatattgctaaaataaacccttcattgtacttgtgttaacacaaactttgtcatgtccactccatagttacagtgccttgtcatgtcctaatataaggggccatgcctgctaaatatcccttatgcttttttcctagcttataaaattatttggacatcatccctcaaataagactgaaaagaatctagaggtgagcacatggagtctcaggggcaaaataagccccaggaaggttagatgaccccatcccaaacatttcaagcaaagctctctatttgcaccagatttctggaatcatctttaagcatgatgctcaatttggtgaataaattcaattcagagtttatttctctgtgttggacacaccctaaggaaatttaaacacaagtcatgcccctcaaaagactgttgctggcagttggagagaggagaaaagcacccaccatatcacttcgtagtctaaagagtgtagactcgagattctctacagtatattgattatgccccttcttttctaagaagaaaaaggaaacaaagaatgttgaaattttgttaaaagttaaagaaccttgaatctcttcaaactacagatggctctcaacttgcaatggttggatttaaagattttatttgatctggtcattctgctcttgagggtcagcacagtgttacagtgtcacatgagctactcaaaacttcattacaaattgagatttctattagatgattttgctcaaatgtaggataatttaaatcccctgagcatgttcaaaaacagccctgtgaaactacaatgttctttgagttaggtttttatttattttttatttatttttttgagttaggtttttaaagtgcagttgttttttcacttactgtactttcagtttatgtgtcttttttttttggaatgtaactgaatggtaaattgggggaacatctgatatttttctatgattttatggcatagattctttcttctatattacaatgaccctcagtgaaaagtttaagtaatctacatattcaaaaatttgtcttattagaacttgattattgagtaattaatttcagtgtttactattgattatagtcactatgatgacattatttaccagagtcttaactcttggcaaagcattgctaaatatttcacttgcttatttatttgctctcttatgccataaacacttggaggaaatgctaaaagcacatagataaatgttatttccctggctacttcttccctttgtaaatcattgtttggataggctcattgttcattgaatgactgcattttgcagctgttttcttttagtacatgaccaatgaactaagtggtcatattttgtctcgagtgcatggaagtttctttgaatcatcatttctggaaatgtgtgctgacttacaagcaaataggaagattctattgatcatttttttgaagtccaaagaaaaatcacaagatccccacctttaagggactcagcagctgagggaggatcaagaagacagtaccacagtacagacgaccttcctcatggtggtgttgtaaagactgagctattatagagactgcatctagcacatagaaactctggtgtgttacgggttcaatacatgatgttcaccacagggtcatgtgtttgagtccttggtccccagatggtgaagatgttttagcagcctaggaaacctttgggaggtgggatatagctgaaggaagtggttctattggggatggaccacacttcctttccattttctgcttcctgatttacccaaatgtgagcaaggaggctcttgtacctaactccgagccagggtcgtgattgcaatcatgcctcctgaaggcagcgttcttccatgtattagttactgctcttaagaccaaatacctgacataacttaaggaggatagaatccttgggtgtagtcacaacataccttgcttagcatgtgtttagtaaagaagacaattttttttttaagaatctattcatttatcatgtatacaacattctgcttccatgtatatctgcacaccagaagagggcaccaggtctcataacaggtggttgtgagccaccatgtggttgctgggaattgaactcaggacctctggaagagcagtcagtgcttttaacttctgagccatctctccagcccaagaatacaattgttaacatggaacaattactctataagtaaattttattaccaaaactgtattggcttgcagtttatatgaaactgcccatttgccttgtgcaaagggatctcttaaattttccatatttttcctgttttcattcttccttccttcctttctttccttccttcttccttcctcccttctttctttctttcttcctttctttctttcatgttattttggagacaggttatcactatgcagccctggctggcctggaactcaccatgtagacatggtcttgaactcttctaccttttgagtgtcgggcttaaagatagatgctactatgcttggcataattttccatacttttcaatatttcatttacacatcccacctcatgccctcattcagagcttggctgtgactggatgaaagtagttcaggaaaaatcaacacctgtccctcactaggatttattatttctagaaggtaggtgaaaatatgggtttgtctttcatttatgaaacactttacccaaataatgaagtagccaagttggaggaaaactgaaaatacagaggctggggcaatcccagttataaaaccagctgttaaaaaaaacagaatgtagagtttccaaagtttaagtcccctttagaattattagcctttattccttggagtagtagttttgggccaacagctaaatcctggaagaggggcagtcagagtatttttcacacaccccttgcattgcacatgcatagccttcttcacttcccacaccctcccccagcggtgccttcatgaggctaatgaacacacaggcactggcacagccgcaccatccagcttctgcataacagctcggttttggcactcattctgcaagttctgatacttgaactccacctcccccccccaccccgtctttgaaggagttcaataaaagtttggtgaaaatgcaaaaaaccaagtccaggaaggaagtgaattttagtcgtgataaaattagaactgacgttcccaaatattgaatatataaatttgtaaatcaaaagaagaaaatctggctttggaaatagagattagagattcgggagttgtctggtttctagggctgcctccctaagggtgtgtccccgggcaaggacacagacctctaaactgagagcatcagtagttcaaggccccagccacaagccctgcattgctttgtactgcctcatgactttggctgtttcaaatgttacaaaggctctggccttcaaaagtaatgaaatacaaacatgaatgacaattggggaattcatttttactgatgatcaagaagaaaatgactacaaatagcacattcaacattttgaccttgctgtgagttacacatgtgaagtggggagggaactaaacagtttttggtggggacactgagggagaaagcagttgaggaattcacatggtgtctaaagcggtcatatgtgcacagcgacagacttaaatagtgacttttgtggggttattttattttaacaaattattgtcctacaataattctaaaactagcgtaacctattaaacacacagatatattgggcacaacattattaatgttatttaaattgtggtcacaacctatatgacccacagtttgcacacaaactgaatcaaacctcattgtcctattggcttataaactacatttccccaggagaaaaattaaacttcactgcttaaatactcaatttaaataggcaaatagatacagtgtaaaaagtaaaaatataaacaaagccccactgtaaatctatttcaccttcacttttttttttttcctgaaacagggtttctttgtgtggccctggctgccctagaacttgtacaaggctgcactgtaatccagagatttacctgcttctgcctcccggtgctgggattaaaggcgtgtgccatcacctgctgtcaccgtcttatatcaagtgttaataattattcttttaattagtttgggaagaaattttgccaaagtaataagattagtaggaaaagagcatcccggatttgtgtctataactttgaggcttcttgtcatctgagaagagggaacctcaattgagaaaatgtctctgtaagactgacttatatgcaagtctgtggggcatcttctggcttggtgattgatgtgtaagggcccagctcactgtgggaataacagccctgcgcagtggttctggagtgagtagaaagcaaactgagcgaggcagaagagcaaggcatgttcctccccagcttctgttggtgttggttcctgccttgagttcctgccctcacttcagtaagtaatggagtgtgatctgagctgtaaactgaaaaaaaaaaaaaaaaaaaaaaaaacctgtcctctccaagttgcttttggtcatggtgttttatcgcaacaataaaaaccctaagacacacttcgatttaaagtgttttattaactatatggacttaggagcgggaggttggtagaacattggcctaccatgtaatcccagcacagtgtacaccaggagcatgggaagtttaaggtaatcctgtgagacataaggaattcaagtgtgagactaactgggctacatgataccctgtctcaaaagaacaaaaacatgagttaaatgaaatccaagaaactcttaacaaaaaaaggaagcatagcagtatttgaatttttaatagctcccaattcttattacttttcatgcaaattatcattatggaccgtgattttagaaatacttcctcaagcttgagaagagttggtagtcctgaagagggaggcacaggcttgacaaaacttagcaattaaaatttttcagatgcctccctaaatatcatcctctacctgggagctcaaaacttcggggtatgaattttagagggacacaaacatggagtgattgtgcattaataatatctctgtcttcggctgtaaaaatatacattcacagaaaattctggaaagctgagggaaagccatagaggatttgtaggatggttagggtgttctgttgaggagacaggtataaaagtttctccaagactctccttgatgtcactaaaagacagataatctgaggtttactgttgtcttgtatttgtttcttctttaagcaatagttgaaaggcaagtgaatgattagtgagctttttatctccctcaagtgtcttctgaattttctagaataaacatcaagagagtctgtctttgttgaggatggtttgatacaagaatgaagtccatcaacaggcttactggggctttggacttacaggaagaagcctctgtaagcaaatcaatatcatttcccttctctgtgcttctgaagtttaatttctagtatctgtgatagtgttagcatatttaagttggaaaagcattaaattctaaggcttttagaaggacaaaatgccttatgctgcagctattaaacaatgttatttatttactgcttttaatcctagacaatctaataagcagaactttctagaaaacaaattcacaaaaccagctttagaaatattttcacaattatttttagtgtttttttttgtcattccaagtcttgctcctagcatttaaaatcatgatttttgtttgcttatagcagtaacagtgtatcatttgtaagttgccagagtagatataacttcatctcctgtcttagaggagatcagccatgcatttaaaatgtttaaatgtgctgggtagtcatggcattgcacctgttttagttatctatttgaaacatgattagaacttgtagcacactaccagacaacgttcatggcattgtcctctgaaaatacgtagcatgtcttcttttaaactgtgattgaatggtcaggggattaatttaacattactttattttagttgtattttggacatcattcataatctgacagacaagcactcagtaaatccttgttgaatagtaactgagtttggcagtcacagatgagtgcactagtatgtttttaattataaatctttagagagactttacaaagaaaggatactaagaaatttgctttcttcttagttggacgatggtgttgacaaaatgtatcaccctaaggaggaatcactagtttttcaccatgaaattgcaggcatgaattcaaataaccccaaggtgtagaaacaatgacttattcgaaagaataaatctgcagcagctactgtgggtttctcttcagtgtccaataattgaatgctaattgaaaagaagggaagaattcagtctcatctgaaaatggagcttttgttccatttgtcttgttggtaggcagcagccaaatacccaagcctgctctggtgaaccaggttatctagcatgtgttgtatgcccagggctttaggaaaggcttcaatgacaaagcactgtgatcatttccttttgtgggagtctttctggagatgtgctctgaaagcctgagcttccaaggaagcacagtgagagccatgcatattggaattgcaaagacagaagaggacctcacacacctcccagtgaaaacagcattagggatggggatttaaacaacacaagccaattattaatctccaggttagccagtcttgcaaaccactgagtgtttatttctcacttggaatacatttattattattttaattattattataatttttttttttttttttttttttacaaaggatctcaggcaggttttgaatttcctgtgcaactaagggtgaccgcaaatttctggtcttcctgattccacctcctgagtgtctgtatactgagtttgaagcattcactaccatgcccattttaggagttgaaaccagggctttcatgcatgctcgacacatattccaccaactaagcctggtcctcttcccctcataatgtgctttctgagaccctgaattaggactgaagtcaggaactgtcatctgagcctgatgtgtgttttatttatggagaatccattaaggctccaattagttctgtcttttgtgggaggaaatcgatttccactcttttaatgtgtgaatctccacagtgtcctgttttgcatggctcccagaaggggatgagcaaattctgatgccagagattgaggcttaaactgcttctaaggagtacccgagaaatacacagatgccgctaaacttgtccccattctaaattgaaagcattgtaaatcaagctaggtgtgaatccaaacatctgttatcccagtcttttgaaggccaaggcaggagacccaagttcaaggctagtctagattacataatgagactctgctcaacaaaagaacaaaaggcataccatctacaagaacttactcttctcgcagaagacatgtgttctgttcccagcacccatatgatagattttaactgtctattattctagttccaggggatctgacaccttcttctggcctccaacagtaccaggtacagctgtggtttgcatatatacatgtaggcagtgtacttatacatacaaaataatcataaattcaaaacaaaacaaaactcaaacaaaaactcaaaaatgatgtgttgaataccagtcatagtttaacaaaagattggcctgtagaagatgaattgtttactctgttcttgggtgatagagactgtgactagctgccaccgcccagcattgagaatcttacactgtatatccttagatacaaaaacaataaaaatccaagatataatttccattcaatattttattactcacagactactctcttatcaaaatttataaggcattcaagaattatacatttatgcttttcttcatccaaaattaaacttgacatataaagtcatggcttgattctatttctaattaacacaaatttcaggctatagacacaatgtctttttgcaaaggataattttatgaaatatatttgacaggtaataattctgtttgaaaaacatcccaaacatgaaacaaaattaagaagagtttaggtttagcaggcacatacacctttttgacacagtcatgatgctcatccacaaaattcatacgtgagaactaagcaatcaagttaaaaaaaaaacatcatgttttcagtacatttatgattttgtgttggaccacagccatagctataaatgaccacctgtagctgtgtgtaccctacagaacatgggtttgtacacgcctgctgtggtgaacactatacacttaccacttgaattttaccactagcatttcattgtaattctgcttcattgcatatgcattcatctatccatcttcatgtccatctgtaaatccatcttattttatttcagacagggtttttctatgtagcctcagctgtcttggaacttgctttgtagacaaggctggcctcaaattcagatatccacctgccgatacctcctgagtgctgggattaaaggtgtgtaacactatgcttagcttcaccttattttttaatacaattcaaagtaaattatagaatattagatcaccattcccaaatacttaagcttgcatattattgagtagattattagattatttccaaatgaaaatatttaacatttattgttgggtatgctttcaactgaaaaaaaaaaacaaaaacaaaaaacaaaaaccactatcattatgacttcatgtccttggagaattactactggagttgagaagcctagtgccctctggtgccatagacagatcagaaataatccttcagctttgttcagctcctgccttctttccctgccaggtcctttcctttgtatcacacaccaaatggacactgctacagctcaaacctttcaccaggactccagctcccaggtctctgtttcctttcttatttccacacttccttgtaaaggcctaatatctacccaaagcaaacttcagagagctaaagcgttgatttagttcctgtctgctttattgattgaattgtattcatagacattaaatagcagggagacatgttgctgttcagtctatttcaaaaaagagtgcatttggttggggaccaggtgatgactggaaggtgtttggaagggactctcaaccttgatccctgacaaatgttttcctatctactacagatcctctgcatttgttatttaaaacaacaggctcaggaattgagagatgcatcagccagtgagggttaagagcctgcactgctcttgaagaggacccaagttcagcatgttctaacacccacttataatggtagctccagggggatccaacacatctgatctcaagggcacctgtacccacctgtacacaccctcccctgtactccatattcctgacctgatcctaggaaatttcccgtgattccagccaatatggaggaagccaagatataaagggagatggaggttctggaggagaggagaggtagtgagagagataggaaatgagggaggggaacagtccagatgtaatatgtgagagaataaaaacaaacaaccaaaactccaaaaacccatagtacctaaaattttattatatctacctcaagttaatatgttttgtatgttttgagttgcatcttattaaattaaaaaaaaaaactcatggtatatgtagatcagtaacacaaagttatacctattattcaaattttaaaaagtattggtcaaattatttattttcttattcctttcagtttctttatgagtagattcatatattaccattgtttgttttctcatgtgtggactcatgtagtctttcaaagggctcttggggacaaaaagagatagcaggtaggagagcaaaccaaattgctgaaattcgaattctatttgcatgacatcgttcaagtcatctaatttctgtaactttgtcttctactagaataggataataacccttcatgagcaattgtgaaaattaagttggtgatgtctgatgcattctgaacttgggaaaaaactgaagtttctagaatttatgatgtctgctatgggtagacaaaatggagggtagtggtactaaagccagaaaattttcttaccatgctggagagatggctcaacccttttaggctaggctcacgaccaaaaatataagaaaatcttcttataatgctatgcaatctcccagaagtgagcacaatggtccccagtgtcatcttggtttttaatcccctgtgtctcatctgtggggctctgtttctaggaaagacatgaaaagtgtctagatgcaatagtgttcagcctccttttaaaagttaaaattccattcagatataatcctaatgtgataacacagcatttcttgagtaaagagttctgtgcattttaaagaaaaaaattaattttatgtatatgggtgctttgcctacactcacaaatgtgtatcaagtgtgtctctgtccagggtgcctacaaaggacagagagggcattggataccgtaaaactggaattacagacggctgtgagctgctatgtgagtgctgggaattgaaccctgtacctctggaagagcagctggatttctgtacgacagagctatctgtctcctcagctctaaatactgcgaatttgaaatctaagtatgtgtccattttgctttgacttaagtgtgccttacttggagcaactgtgggagatgcatgcttctgtgtatgtgtgcatttgtgtggaggccagaggtggacagttcgtgtttcacttgattgttctcacttgatttctgagacagggctttaaaaatttgttttaagcatttatgtgtgtgagggggtgtggttgggtatggaggatatatcactcatatagtgtgtgtagagttaggtgataacctgtgggagtcaattctctccttctaccatgtggtccctggggattgaactcaggctgtaaggtttggcagctagcccctttgctgactaagccatcttgttggtccttgaaacagggtacatccctgcatgtggagctcactgattcatctgggctggctgttagcattcaggcatttacactggcctgctctcagggacctaacaggatacatcatcaacggctgccaccactaagtagaatactccctgtgcgcctgcgctgtatctccttataaaaagcaagcccttctcacccttgctcccccttttccctttgttcttgctcagaggccacctctgaatgcgccgtccccccccccccccgccgaaacttcccacatgagttatgtcgtatggtgtgactggtggtgcctcttggctccaacccaccgaagttgccctccagccaccgttaaactattacactggctcctcaggaagacctagggctcctcctgcctgtctccccaatgataagattgtagctacgagtctctggcccagctctttacaaagatcctgaagctattagctcagcccctcttcttgtgtggcaagcattttatagactgagccttgggtttcatgcttttaagggtatgctctcagtttaatgctctagatttgcagttggaatcaatcccctgacccctgcatagtcatagtgacacttgctatgtattgaatgctgaggcatgtagaggctagagataacctgtaggggtcagccctgaacacgaggctttgtaggcatatgctatcacgtccaattccgctattgctgctgtcctgaaatacaaaacccttagccaagagactgcattttcattttgtgctgggctcaccaaattatgtagccattcctgggtctcaatacactcttccattctagctttatttttggcttcatttttatttcctgttgtatttctgatatatcttaatatcatttcctgtaaatttttctaattgtcctatgtgtgagccacatagtttccatttcacaaaagacaagagagtagctcgataatgtcatgacttctgtgaaaccttccctcctcagatttctagtcacatttttctcttcatggctaggctgacaacattcactcttcctgccacactcctgaattcttccttatcttgaatcacttgctttccgctgtggttacttctctggttattagcatctgtatggccttttatattctaggaggaactgtcttcatagatattattcctaacaccctactaggaaacagttgtcgaatgaattctcatcactgtgacaaaaccaactcaagaagagaagagtttctttggttcacagttacagggtatagtccatcatggtgggcaaggcaggctgcaggaaccggaagtagactctgtcgttgtcactagtcaggaagcacaggagatgaatgtagataccatgattactctcccctttaatagctgtcagacacagcatcctgaattgatgccatccttaggtaaaatggagttcctacctcaaccaactaatctacacaatccctcacagatgtgcttgtctcataggcgattctagatcctgtctggttggcaatattaaacattgcagtgatgagtcaagcagtaagctacacacccttatgtagacttgaaaccataccatttgtgttctgaatgaagtatgcatatgaagatgtatatctgaatgaagtagttgctgaaaaggtcattgctaaaatgatgaatgcaatgaatcactgagtcattccaggtttggttttatatatgttagtgcgtatttcagtggttataattgaagaatgtgtaccatgctttccatttccactcagtgctgttgacagttctgactggtagatttaggagtgccagagttcagattaattatgcagaaggatattactgacacatttacaagctttatttccactttgagcattggttgcttaatttaaaagaaagtttctgtgctttccttttgtcttaggtccaaatgtcattagcattaactttacagttcatccttgaaaggacagtttgaaatggacatttgggacaaaagtctatctcctgtgacagatcaacaactagaagcaacagttatgagcctggtgctctgtgtttagacttgcctctctgaaaactataaaattggcttcaagaatagatgctcagggacaagttttagctcccatcttatgctaactgacccaaaatatttgtctgcggtgctgttatgatcttttgagacaaatttctgttctcttccttacagaaaagcctcatctttacctgtagatgttgtctcccatagcaatctgaaaaaaaactgttcctgacattgtaaactgggagctggagctgggacttagaggccatggttagttcgagaggttgaaatttttatcttgagctgaacatcttgtggattgtgttatgctagggaaatatgttttatctcaagcatcagattccacgaagacattagattttaggaattactatttaacaagagtgtggaaggtaaaatggagggaaacctttgacctatcttagccaactctttgtctttctatttagtgttcatgagatatgtatttgaattaagccacttactgggagaggggaaaggagtgcttgaaaacagattagagagattattaccaagtagaatcagttaattttgtcatcactcagtaggctgagggccagaggactgtaaatgtataacttggccacatagtgtgaccctgtctgaaaaaccaaacaaaataagtcttaattcaagtgatcacagggggtgagaatcttgcctctgctggagtatcttatctgaggtcttttgctgaggatttagaaaggagaaataggggcttctggctagtggtttttacatgggtcaaactgagtttcaagtaggaaaaaggaagttgaagaaactgaatccaggtgagaaggtgtgatagtgtttagaatagtttgccctggagctctggggaacttagaagccatcaactcagcacggggtaaatgaagttaggaggataaagctgcttcagggggaagtacagaaggaaagatctgagacttctgttctttgaggaaaaggtgagctctgtagaaattggcaggtctttctccagaaaaactagcgtgcacacagacatttgttatgagccattcatgtgatgcaaattagatcttaatgtgggactctttggaaagagaattttgggttatagcaaccaggcaaggtctaaagttatgctttagactcaggcactagatagatgtgccagagacctcagggaagagaaaactggaccttagagagtcctcagagatggactacctgtgtgtaacattctgccctttcagttgctcttagtgtttcttcagggaagaaaatcaaactgagtgtcagcctgagtacaagaccagggtagctctgtcccaggggatgaaagtagcatccacgaagtagtcttatgtgataatccccaagggagctaccttaaggtcacagatcccttgcttcagcagcattttcctttttagaagaaagtaggacctctttggtgctcagatcacaaaatataattatcaacagaggatataggtcagtcaggaagttgcttcaagatctgagttcaattttgaaaactcacacaaagtcagacatggtggcatatgtttgtaatccccgccctagggaagcagaggcaggcagatcaccaagactcactggccaagtcagtttagcccacatggtgagtgcaaagctagccttgtctacatagtgagctccaagccagtcagggccacataccaaaacacgggagcactggatgctgattactgtgtctagtatcatgaaatacctgtacagcagaattgatgctgaatccagacagcctagttccatagtgtcagatcccagcgccacactccagtgactacttgttcagtgccactaatgttcagacaaagactcaggattacccttggcatcatctagggcatttgtagagaggtttcattgaggaaggcagatccactggaacgtgggtggcatcatcccttgcatgggctgtgggtcctaactgaataacagaaatggtggggagtgagtatccatctctgcttcctcactgcagatgaggagtagctaactgcccacactccagccacatcagctccagccacctttgctgccatcccttcccagccatgatggcctgtacacccaaactgcgagccacaataaatcctttcttccttaatttactgttctcaagcattttgccacagcaatgaaaaggtaacattacatatgctaatgtccccttctttcagcattgtaccccgttttgtccaaacactcctgagtctttgcttccctctggctgaggaaaagtaggttttgcttactatatatgctttgtgtatttgcttctgtgagaaaaacagatcttaggtatggaggatggagagaagcatcactgtgttatggctggatattttcaagttttttaacagttgtttactggaagctattacattaggcactattgatgggtacagtaaaacattatgaaaaataccaattcacattaatcaaggatcttccagtggtcttagaagtccaatacattcagcgggtgatgcaagctcatcgacccctaaagagccccatgaaagattaattcgcaagcagctatcttccgagtggttttgtgaaatagttggaaatgagtttcagacctcagtctagccaagagattttggaaatttatttttaaaatggtgaggctgttgaaggaactataaacttataataaagcagaattttctgagtttaattccacacaggtcttagtaagacaatagaaaaattgaatgccttttctcactattagcaagacattttaaagaaaatgagagtgagggttcttattatcttcaccccctcttcatgccatgtccacttctagtccatggactttctgaatcaaatactttaaagacactctggacactcattaggcaaatatgtttaggattacgtacttactgggatttaaaattatcctatcaagagtcatcacttttttaaaagattatgtttaaagcacttttgtagtcacagaatgagatgctatggcatcttgttcataatgatgcttgttcatgatgtttttatttttaaaaagatgtattaatgctgggcgttggtggcactcgcctttaatcccagcacttgggagacagaggccggcagatctctgtgagtttgaggccagcctggtctacagagctagttccaggacaacctccaaagcaatacagagaaaccctgtcttgaaaaacaaaaaccaacaaacaaaaaacccaagagatgtattaatcagtatcttagaagtacaagaggctgaaaagcattagtgtttgccagcatatttagtgttagaaatattttcccctattgatagaaagcacacacacacacacacacacacacacacacactttgtgtttgctagggtagtactactattgtccaaatttctctctagcattcttaaatggactaaaccatttttgcatatatgggtgtgggagaaagaaacattgatttattgattacataattgtggtctagacactttttatttgtttaggtccattaaactctcctagcagtcatatgaggaagatgatgtcatcttaattttgccagagaagaacagaagcttaggaaacaaagttcactgtggtttcctattctgctactttggcagagtagatacaggtttaaacgccagcttgtctgaatccagggtaattttctttgtctttgtagactctttgtataaaattagtacatggagagatactctcctagcctagatccacaggggaaggcctaggccctgccccaaatgacttgacagatttttatgatcccttgtggaaggcctcaccatctctggggagtggatggttggatgggatgggtaggctgggagggagagggaactgggattgatatgtaaaataagattgtttctaatttaaacaaaatttatataaaaattagtacacaataaaaaaaaataaataaataaactgttttggttaggaacagcaaccttaaaaaacaccctttttatttacactaaagctcagttcagtgcatgacattgatattttataggaatccaacaattaagcaaactgtgtaaggtatatcctatgagaaatttggaaggcaaccttcagctttggacttctgtcccttccaccatggagtccccttagaaccgagcgtgttattctctgtgatattctccttggctatctactcaataatgtgaaacctgttgcttcatcacaaataaaggctggtgtgttgacaattagtcattttctagtgccctcaggaagtctctgtctatatctgacaactgaatactgttttcccaacaggacctggctctctcttaagtacgatggactttggttagagctgagggtcagctgttctgactatgctcctgtttcaaaagggctatcaatttgctgtcactcttttttttttgtcttcattttttgatttcattttacattctaaccacagttctccctcccacccctcctcccacctcccttcatctcccccaaggccgcccccagtccactcatcctcacaggtaatttgctgtcattcttgatctacacccgtagtagtcagcttcacttctctgctgttactttgtctggagtcactaaggggctttgcctgtcagagaactgacatttccaagagcagagggaaagaataagtgctttgttcagaaaagccttcgaaggagacacaggggccacctcacctgcagctcagtggatctgaatgataccatgcagcagctcatatggcaattgtgcctgtgcttgccaagtgtgaaaagggacctttcctctgtgagaggtcaacctctgctccgcattgtgttggaactggacgttgggctccatggggtcaatctactgagggagaaatccaccagaggccagatttgtatttagcactccccacaaagagccattcgcttgtgttctgccaaaagtcacaagtgaccctgctggaatatctgaaggtgtagtcagctatcagaataatttagactatgtaaataagctccagggaaagtgagctaattccccagaaatcgggagttttgcttttgtaagtttctaagtcacgttcatcgaaatttgcaggaggcttcaacagatggctgagcccgaagtagtaaattacttgtaacctcttcaagaagaactctgaatgttaagacataaaggctgtaaagcactatagccatttcttaatatacttcattcattacgcagattatagcaaaccatgtgccatgaataaatactagagactgatgttggggttcaagattcaagctgaagttcagagaagcaaagcagctggccactagctctcacctctacctcaggctgaaagggctgatactgtcttcatgagccctcaccaagcctcagactgcttcctctcctcagtgtggctggagagaatcagtgccttcctatcctcaatgtggctggagaatgaatacctgatactgactacccaagaccctgcttctcgtcttaaatacctctctagtcctgggattaaaggcgtgagctctgttactcttttagacggattcaatctcgtgtagccctaggtggccttgaatttagagagatccatctgccttggtctcctgagtccagggactaaaggtgtgtgcctccactgcctggcttttatggctaactattatggctgcttggctattctggtctccagtggctttaataaatcataaacaacatatcactccaatagctgaccatgtgaggcccttgctgttggaggtgtgcatagcagcaggactcaaactactgacctctactactgtgtgctttctattgtttctatcctaggatgcgatggtcaaatgtaatgatagcattgattgttatcttgacagcacctagaaccacttagaaaaaaaaaaaaaaacaaaaacctccattcatccatgcaggaggctcacttcctgctactgtgcctttgctgctgtgctggaatgcacatctgtgcaggaggctctcactctgcctaccatgccctgttgctatgatggaatgtgcacctgtgtagcaggctctcactcctgctatcatgccctcgctgctatgatggatgcacatctgtgcaggaggctcacactcccccaacctgcccttgctgctatgatggactgtatccttaaaccatgagataagacaaacccttttccattaagttgcttttgtcaggtaatttgttacagccacaagaaaagtaactaattcaccgaatataaattttgtctttctaaggaagatgcttgttctctccgaagaaatgtctgagcccccaagtatatgcagggcctgtctagtgcctttcaggagagaaaagattgtagtgagaagatatttagcattgtggtctggatagttcaatgaataaattatttttgataactgtccctaaatgctgagctcaactaactagtctcccttttggttccatgttcactaggcagcactctccttgagcagtcttctttcagaagaagataggctgatcgtgttgacaggaatatttaagtctgtataacaattaaattgtttcttggcatgattgatgtgttggtacttgacctttatttttaaaggcttcctaagaatgtttttcttacaggaaatcctattatactaaaatatttgtgtcatcaagtcttattccttatgattaagtatgctaagtggatctgaatgataccatctcaacagttaaacagaaatacctcaccaggatgtttccttgaaatgattgtttctcacaaatgattttctgtcttattgaactgaacatctgagacaaaacacaggtcatgaaaacaatgctatggtattgtgaaaatcagaaccttatttcatgctagcatctgggtaggtggaatacttttgggtacctttgtggaaatttgtaaacttacaaatgtacatatagatctacagtttgggtaaacaggataccagaaatcatccaaagaacacacagttgaatactactgcgttatcattgttcttttaaaagcactttgatatatatatatatatatatatatatatatatatatatatatcacaatttcaggttatttttgattcaacacctaacttattggtataagaggaggtgaggtaaatgtgcctaaaatttaacactgcatttcacttcagtttagaatacatagtggtgagtgatgtcatttcaaatcagctttaatgattaccatagaagtggacttcatagagagggccctggcagtgactggttcattaaagctgattattaatcctatttcctttttaaaaacttaattgtatttaagtgtatgtttgtgggtatgtgcacatgagtgcagtacctaaggcggccagaagagagcagtgtcacatcccatggaagtggagttacagggggttgggagcagcctgattgtgattgctgggagagaactcctatcctctggaagaacgggaagagctcttaattcttgagccgtctctctagtctcttttgtctttcaggaagttgaaaacttctgaattccaattagtttgagttgtaaaacttcagtttatattaaattgctttattctgttaggtttatgtctaaagattttctttttttcttctctttcttttactcccttcatccctctttccctcccaatcattccttccttttttttcttttctttcctttccttttctctctctctcctctctctctttgagacacagtctcattgtgtgactctggctcaactgaactcacttagtagacaatgttgctttgaacttacagagatcctcctgtttctgtctctcaagtgctgaggttaaaggcatgtgccaccatactctgcttaagtctaaacatttttggataatttatccatatatatttgataaaatcaggcatagaaatattgcccccccccccatgttacatatgaagacaatcagcggtaactaccctctcaggatagttactattgcttaaaaatgactggcctgatcacaaaatggatgagcatgtgatcaacaaaagcaaagacaacaaaagtcatctgggtatggatttcacttagcctaatgacctgtatacagtaagccattaataaatgtttgctaatagtagtaacattttaaagtcacatattacatattccctttatatgcttttcatcagtatatgtttcagggtctattggcatagattaattctgtagtaactactatagttttacaagcatgaactataggggctcagagatacccaatggttaagaatgcttgctgttctagcagaggacccaagtttggttttgagtactcacataagacagttcacaactaccggtaactacagctccagggtacccaacacccctttctggcctttgaggacattggcacacaatgtgcacatatacacacagtcacaatatacatataaataaagataaatcttaaaaatatgacttaaatcttaaaaaaagttgacttcctttttcttcccctccatccctcccaccagtttttctttcttcagaatgcctatgggtgtataactgaggtggcattaaattatgatactacatttgacttagattttcttactattggtttttgatttttatttgtttctttgttttaattttccccatcttggagttgctccctccactttgtatagtatggtaaaaacttgcttttcccatgaactcctagacatatcttttaagtacctcaatattgatatattgtcttgataactaaagattagcattttccagaatcacttagctccctctcatggttgccctttaacctggaagctaagtccttttaaccacgagaaatcattgactcatttcatccttgaggcaaactcttgaatggtggttctgatttttccctggatttagcctttccccagatgtccaactcttttctctgttaatggttttcagactccacattgaaagtctgtgatattctgtcctggcctagccaggcccatggcacttatttggatttctctttcaagcctaaagcaagcttcggacttgcatgttaatcttgcctgggattttacttctgcacctgatgatacatttgtagcagggggacttgcctgtcactcaatgacaagaagttaattactttgccccagcctcatcacatgctagacacttttttatttatttgccacaatagtcacttatacaaatgggtggcttaactttattgcaaacagaagttagcaaggtcacaacactagtttgaagcaaaccactgtttggtgtaaatggaattcttaattggtctaagtagtaaagactcaggccagcctggtttacagagcgagtgccacaataggctccaaagctacacagagaaaccctgtctcaaaaaaccaaaaccaaaacaaaacaaaaaccccccaaaactcagactcagatagagaggaaaacgtggagagatcagagagaagaaggagcaagccacagccacaccttatctccttagtatcttggcagaccagagaagagttcctgtttcttcctgcttatatcatgtttctgcccagctacctcacttcctgtctgtctatacagacctccagacctttatggttagctagcggtaagctccattgtctggccttcagacaggctttatttgtacaagcaagataccaccacagtttggaactcagacatgtctgcattcagatgaaaatgagggtcccttgtgggatattttgtttatttttttttggtgcctattaccagatgaacaaggcaatctacagaaggattggcagaatcaacagcctccccagacagtgaggactcattagtaagtgggtgctgtcaccattgccctttgcctcttaaaggggattggatcccccttcaaagtaacttctagcttagagcatatgaattccagataagctgttcaaacagtgaaaggacaggtcttcaatacagactggcttaggtcagccctctggaaattttgtttcttcttgagaaatcttgttactgagaaggaagcactggattagatgaggctccactagccatgaggcaattctacatggaatgatattcttctcaattatgtgttgcagtcagtcagaactccattacaagacatagacacacacgtaaaaatggtctgtcttaagaccttatttcatactcaaatgctgagttaactgactctgaacttgggaattgctttagatcctgtctgaccctggcatttttaagcattttggggtcagaagctgacaaactgttaaatggacacactctctctgagtgcttaaggaggtggcctgatgagctgtgagaagcagaccaggcccgagtcagtacctcccatgcagaacggtgaaggtttcctgaccaactgccttgtttgtgtttcctatgaactaaaagaggaatgaatgggattggagataaactttacacacaatttcagtaaacaaaatccatttagtctgaatccgtagggactccagatgtattgtccatcacccggcaccagctccatagcctcccaaatccaccgacaggctcgagagctttctgcacaaagactatgcagtttttgcattatttattaggtttactcttcttgtagacttacaagtcaaatttaagccaaatgtgatataatttcagcatttgggaagctgaggcagggagattatgaatttcatgccagcttatgcagtgtcttgaactcttgcctcaacaaaacaaaacaaagaaacaaagtgaagcaagtttatcaaatataatgtatttgagtcaactacaacctaatgaacttttaaataaatatctaattatttatgtatttggctggactgttaaattctattgcagactgatggagcctgtagtcacagttgcattagagttttagattgttactgtgtgctgaatctcaaaatagaattctgcttaggcattataaattcaacttcctatttggtttagaaattctcttatgtaataatccaaacagaatctaaagatctccatgaatgctcttaataatgaaactcttatgactttacagtcacaaaacttaagccaattctttgtctcttttctaacagccatggttagagaattcttcctttcctttgcacacacacacacacacacacacacacacacacacacacacacacacacatttaagaaggcattcaagaccatgcttctgagacagacagaaaattaaaattacagtttcaatatttctatttaatatatttaaataaggctacgatgagaaatgcacatataaaccatggcccttcttagggacatcgaataaaggaaataattacttaaaaactttagtagacaaaaaaaaaggaaaaaaaaactttagtagatcccataactgggcaccaaaagtagcaattctgcttcaggacttgcatagaaccaggcaccgttcttatatgtggtgggttgggctgctctctgaaggggagaaatgattggacaggatggcaggcagaactgtgtgtctcgaatcattggccaactttgaagctaaataagacacggagtagagggtgctagaacaaattatgattattgagggatataaaatgctttaaaactttttaagactggttttttttattatttttaattatatgtatgcaagtgtgtctatgtggagctatgtgcacacaaatgctggtgcccacggaggccaggggcattggatccctttggagcttgactggttgtgagctgcctggcacaggggctgggaaatgaactcaggtcttcctcaagagcactatatcctcttaactgctgagccatctctcttgcctcctaaagtgctcatgttcctaaagacataccatttctatctgtttaaaacatcttctggtctgctttgccagtccctagctacaagccatgagtagctctgtagcacttaacatgtttctggtctagacttacacatgcaggcctgtgactccatgacttggtaggctcaggcagggagattgcaacttcagggttagcctgggctacatagtatgacctcatctaaaaaaatagaccctccccccaaaaacccaaagccaagcaaataaacaaagaaacaaaaaagacccaaatcaaataaagaactagtctaaactagtgtagtctgagatgtagtattggtacaaactatataccagatttcaaaaacttaatattaaaatgtaggtaaaatatttctcatttttagtacttagatgttttgaatatattgggttaagtaagatagcagaatgaacttcctttaaaaatggcttatacaaatcttagaattaaaccactgtcttacaatgtatttctatcatgtagtgctactctaaaaagcggtcatctggatttttaaaaatctgttctaactgcattatcatttgcaatctggccagtcatcagagaaagcaagatctcaattctgatctgtcatttgttccgttgcatgtccatttcaaagaaactgttctttgttctgtattccctgtgcattcaaagggaagcagaatgctaagaaaatgatgtttgaatttctcaatagctgggcatatagaaatgactccaggaaagaaacacttacccaaggtacctctgtgatgatattgttaattccaaagtgaggcagagatgaggatgccgagaaccttgatgccatgcaattcctactagtatactagattgtgcaaaagggaggagaaggcacaccatacagctctcccgccccctctaaacattttaaataaaatacattaaaaatgcatgttcattttagggagtttgaaatagtcagagaagtaatgaaaaagcatccattattctctcattagaaataaaacaacttgttattaatcatttctgtaattatctgtatatgtgctcaataaaaatggaactgagcagttttgtaattagcttttgtcacttaatatattataaatatctttctgggcccataaaagcatttctaaaacagtggttttgttttaggtttatttcatcaatttcctttaagtagaatataaagtaattagtttaattgtgacattttcacacctatacatcattatactttattcttattcaccgtcccaccatgggttttagttttaacagtgtaagtacattttcttcagataaaaatcattattccaaagcttggtctttaaagccagtgaaagcaaacatactgtttgaagcaaggttggcggcctggccccctaccggctatgatgggtcattacatcacctaaggctctgtcatcacctagggggctctgcagtgcatagttaaaatgactgagggttctactgtcttctgcttccctggtgtgtgtgtgtgtgtgtgtgtgtgtgtgtgtgtgtggtgtgtgtgtgtgtgtgtgtgtgtgtgtgtgtgtttgctgatttttgccttacaagctaagtttctcagttcaatttggcccccaggttttgttactgctgttttggtatactgaaatgctgactttttacatgatctaatgttgctttgttccagctgccactgtcagtaagaagaacagactaactggctgaagctgcctaggaaagctgtcttatataatgaaagccactctggtcatacacacaaagtagctagttggagtgaaccaacttttggtcttccagctttcaataacatgttataggtgcaggagtgacctataatattggagtttactatagaaatctatggagttttttttcagtgctagggcttctcagttaacaaatgagagggaaaaattcatgcccagatacagatgtttgggtctaggaatccaattctcccagacagtgtatatgcctgagaaattaaggtacatgcattatgaagaacccagtcattatctgattcctttcagagacattgtagttgatttaatagtatattcagctagctttgttctacatctaatatataacagataaactgtaaaatgtcatcatgtagacatgactattaatggttcattggacttttgttgttgtttttgttgttacctctacatgaattacctttccccattgctgtggtaaaaagcccaacagaaagcaacttacaggaggaaggacttcctatggcaacagtttgagaaaatcctgtcccttgtgatgggaaaggcatgagagctggaacacaaggctacctgctcacaatgggccaatcaagacactaggggctatgtaggctagcactcagctagcactctctgttctcccttgcaatttagttcaggatccaagcccatgggatgttgtcacccactttcatgttgagttgtatcccctccaccattcttcctggaaacactctcacaaagaaatctgtgcctcatcaatgcactaagaatttttttaattgagttaatcaaaatgaagcactatgacttgggaatatcatagcatttcccttgttcgtgattcctcccctctgtgaaaagtcagtgtcatggaaggaagataagacagaaatggaaggcatatgctgggcccagctctgtcagttactagctcttttactttgggtaaatttattttgtaaaaaaaatttttttatatatttattgtatgtggtttgttgttgtttttaggatctggggtggggtggagtggaacaccacagcatgtaagtagatgtcagagggcaacttgggaagttggctctgtctttccaacatgtatatctgtggggtccaactcggggtcattgaccgatttgagagcaagtgccttaacctgctgagccatctcacaggcctttgggcaaatttgttataataaagttagtagttgcaggggtgtagtgtgtttatttgtctttaagaagaaagtcagtttgtgtgataatacaattatttttcaataaaatggactttttgcttgctttgggaaaaaagtgagtagaatggctatagattattttaccatataattgtaagggtagtgttagattttgtttgttttgctacatagccagattgccctggaacacacatgtagtccacactagcctatccctcatagtcctccttgtttaacttcctggacactggtactctttatttaggataccacatcggtgtcctaggtcctgcatgttaaaatggcatacatttgaaaacactgctcaattgtaaataatatgctattttcccagccatcttgatgactaggtaccttctggcaacttcccagtgaagggtgacacatcttgttctcagagctaaacaagacaaagtctgaagcccctttttcttcctcttttgtgggggtaggcaggatctcacattttcaggctgacttcagtgtatttgaggatgaccttgaactcctgattctcctccttctacctctgaggtgttgagaatatagacctgagtcaccacaactggcatcaaagtttcttcctttaccatatacctggttctgaaacacatatattgaaattctaaaagctgtactatggatctgtaactattagatttagcaaaacatgagagaaatagctcatatgactgctggagtctcgagatggaggaaggcttaaagtacaaggtctcatgccatgacttttatttaaattaaatacattaaaaaaaccttttgtcaagaacggctttgcaattataatcaagttgcaatgatttgttctttgaattcccatgagcataaagattagtctttccctttgaacattttcactttacataaagaacattgtcaacccagtctaggtggaggtacattattgaaaagatatagtgtggcttccagttggggacttttggcaaagtccctagaaatctaaatttctccagggaagtgaatatgacttcctgtgctctctgtaacactgaaaaatggcaagccttgaatttcattttgtagccagtctgactcctcaaaattaagttatgggtgagttcagtttacagaagttcagagtggtctaaatgcttggtcaccccatattttcgagttaaaaccctaactaccaagctgacagtatcagaaggtgggtccttcgggaggtgcttagattacaaaggtggaattctcatgaatgggatgtatctttgtaaaacaggcccaaagagatgaactcactctcccaccatatggtgcagtggaaaggcaacatgggaaaggcaaaaagctgtatcccttacacaattcatctccatgcctccctggatgtgtatttccatctgccctcatagccaagtaaagccacacacgagtgaaaccctctttgcaatttaaaggctgcttgttgatggcattcaaggctgttttgtcctttccataccaaacatgcattatctttcatagttttgttactggaggggcactcactgtctcttactatgtgatatgattatcaggttctttatgtctcaaagaatagagggagagacaggggagcagcaaggaaagtgcttatttattgagtcccagagttaacctagtgattcataagacagacctctgtgaccctgttttatatttgtttcttatgtattagtgtcatctgtcataataaatgaggcattacaggtagtttcagcaacaggaattgccatcgcttgggaggctaagaggtacagtcagatttttatttgggccaccagcttacaaaaactgacaaaggaacttcttattaattatgagagcttggcctaaagcttcgtctcatcccattagctcttataactgaaatgaaccaatttatatcaatctacattttgccccatggctttttacctctcttccatcttgtacctcctgtttcttctccacatactctggcaacttttttctgctaagattcctctcttcttttccttctacacaggagtcccacctaactaacctcttcctacctagctattggccattcagctctttattaaatgaatcagaaggttcctcggcaatgacacatcttcacagtgtacaaaaaggtaattccacaacaggaaggtccaaggtgaaaagcacaaaaatgctgcttgtctttccatctagagcatttcctgatatgcagatggccactttcttgtatggcctcacatagaggataaagacaaagaaagcatactctctaattacgttgtataaagacattcatcccatcatgatggcctcatctgcaactacttacctgctgaaggcttcgtctccaaataccatcatgaggcaggttagggcttcatagaaatctgggagggacagtgcagtccatggctccacaaagtttgttcctgtggttacctgatttgactttccaagctcattgaggacgagcaccacttctctccccattctgctccatcatagccttaggtcagaagctccaactttggcaaccccaatagtctaagcttcacccagctgggcccatgtgccaattgaaaacataggtgatgataaaatgagcgaggggggatgcagtaagtacagccacattgggaagatctgaaaaaagacttcagtgaccccaaatctggttttggggtattgacaagagatttagagtaaattgaggaaggattggggcaaagggtaagaggcacagataattacgcagttctcatcaagatctgctccttgattattgtctcatctctcattccgtattctggaaggaattcttcttgctgagggaacaagtgggctgtcagataattacttccacctcaggatgcagcctgccatcatggacagtaagttttacctcgggggataatctgtcctacttgtctttgctcatcctggagcttaaggcgactacaggtttagataataagttagttatctctgtgccttcaacttgaagaggaatgaagggtagacagattatccttagtgattgtggtggtttgaaagaaaatgtcctccaagggagtgtagcactattaggaagtgtagccttgtggagtaggtgtggtttgttggaggaagtttgtcgctgtggaggccggctttgaggtctcatatatgttcaagatactgccccagtgttcaagttcacttatagttgtcttctgatcaaggtatagccagcactacatctgcctgcaagctgccatgctccccactatgctgatagtgggctgaacctctgaaactgtaagccagccacctcaattaaaagttttcttttataagagttgccatggttatggtgtctcttcacagcaatagaaaccctaactaagacagtgattatcctttctacgcagaccaatcagcagtttgaaacaagtaaaggagacagacgcaaagtgaaggcagaggtgcctggctttcacccacttccagctacttcatggctccatgtgagaggccaagcctttttatcaaaagctgtttctcagcatctcttatgatacctagtgcactgcaagtgctcactaggcagttctcatcataaactcttcatcagctacactgttgttttgtattcatctgagggtccttttttttttttttttcctgtttgtaaatcattctgaggaaagctgtaagtgtttctcaattgcagggtgaggaaaattctatcagaaatgtttaaagcacatgcatttcacccttcttgtccccctctccctgaccataaagttcttgcatgaccagcttagggtaggagtggagcctagcccatgtgtttatgtttcctaaaatttcattcccttctcttgggagctagttgaatggaattttcagaaaaatttaactattacatagaattaagaaaataaatatccagtctgaacttttgaatctataaaatataactccaggcagttagggttccttcttgtaagattttagtctcattaataagagaatttaaaagcagactctgaaggaaacttaaggacatttcattgggtttgagagaaccataagaaatgaggcaagctacagatcttggtagctgatgtgaggagagagatggagaagaagaaagaaatcatagccctttgagttgaggttcaagaaagttggcatcttcagccatgaatgttggcagcggctgcatggtagaaggggtggggtggctgtgttagagaaagactgagaatgttcagaatgtcaaggacagcataataaggattttgtctagcatccaaagaagagataggagcaaaggaaacattacattttgcattggtacttagaatcaggaccagacttagcagtgaagacctgcaataactgcattattgtgcccacctcctcagcattgggggaaacagctttcctgagagagggtctcctggccagacgagtgacacaccaagagttagattaagtcttaggggaaggggaaaattgtatgtaatgttctaatcatgggggcagctcaaaaaaaaacctcatggctccacccagggccagagtttaatctcagattctactctttgactaggaggaaagagctatctctggataggccgcaacaaagcccagacacctctactttttcatgtgctattttaaatcccaaggagtggcagttatgaagcttctctttccagtgttaccaagaaaacaggagctagggactgaagtctactaagaggaaggaggtccacttccaattgtctccaagtcagctaatctctctctagctacctaacattaattattgttaaataatgattttaacgttggaaaaataatttctgcacccaaactagattataggaactgaagtttgatttattaaagtttaaggaaaaaataattgaataatagagaatttcaaagtaaacactcatagcattcttcttttctgaagttatttgcctggtatgtgcagcaaaggttcaactaagtcaggagacctgtgtttaggacactctgctgctgaccgctgtctgaccccatgcctgttatgtttctttctaacatttgttttcttgcccataaatcaggcagtaggggtagataatttctgatgctcacataaacttcagggcagaaaaatactgagttgcccagcagtatttcagaaattcttgtttcattcttttattagctatggaatatattaataaacaaatcgagagctatagtttcatctttactggtcttggtgatttgactacaattaaatagacattataaactgccaaaaagattggccattgaattgatataagagggagatatgcaaatactaattcataagaagtaccttcatttcttcaggaaataattagattaaatttttaggtaagtatagggagtaaatatgtttttttttccctactattttttaaggcctcttttaacatgcaccctaaaccattgtcctagcaaatcatttccaaaattgaattcaagatttgcataattttacagagtatgaaacaaaaggcagtcgtcattcccgaaatgtagatttgtgctgcttcagggagggcaaatcagattttcctacatatacacacggtgctgatgcagaatgctgctttatatacagccagaaggagatttttctggctatcaatttagctgggaagttttcttctgttggtttttcacaaggttagagctgtgatggttacatttattttctttatgtgtctctggagttgaccagcatttcagcaaccttctgttagctcttttctacctagtcctctgtattgttattttctttaattttaaaatattgctagaacaaaaccatgcacttaagtgacacctgtaatgacaaatcaattgtgttgttcacattgcaaatattagatttagaagaaatgtgtttttttgtatcaatttgaactttcatctgagctgagctgtcatttgttcttatgaaaaagaagtcctaggattgagtgctaaaacttttcaagaagctggtaaggtggttcagtgagcaatagtgcttgcccccaagtcaaatgaccagagttggattcacagtatctacatggtggacggaaagagaggaatgactccttcaaattgtcctctgatctccacatgtgtattgtggcatacacacagccgcacccctccacactcaacaaacaaattaggatttttttttttaatttcaaaaaactcctgtttgtttggattttgacccttcaaaatatttaacaaacacttatcaggtattccaggaagtttgtgaagtagattttaagaataaaaaagaattgaagatggagaaagtgtgggagtttatctttaagctcaaagtaatgttgataaatttagtgaatgcaaacagtgaagtgctttgtagaaatgcttttaagagctaaaactattctaagtaaaacatgtgtgctgggtggcggtggcgcgtgcctttaaagaggcaggtagatctctgagttcaaggccagcctggtctacaaagcaagttctaggacagccaggacctcacagagaagaaaccctgtctcaaaaaaaaaaaaaaaaaaagtgagactataataaataagaaggtgttataggccctcatgaatattgatatgctggccaacccataatttaattgtaagcatttttgatgctgaagaccaaaggtaagaacctagatgaagtactagtaggtttgcagcatccatgtctttgtggatctttaacacacaactatttgccctgggggattaggtactctgaagtgcagtgtgtctccttgtgatatggatagcaagtgaacaaaagcattccagggttctgcacaatttgctttttgcttctccaagaaacatgctaagaggtagaccctggaaatcagcattatttgaattctagaaatgatttttactcatgctgagattttacaggtagtgaaatcagggacacacagcaggcccaattatcttttcacgttgcaagtaattagtgggaggcttcatagtagaaattaagctttaaattaacaattttagtcaatccaaagtgtttatgtaaaagcacaccttgttctttgagtcatttacagtatgcctattgatatgtctaatagacatggaggtaaactgggcctctattctttgtcactttcaaaggaatgttgtatatgctattcttttaattatcacaactgtgtcatattattttggagaaggccttagaatgaaaaacagacatcatgccctgttaagtatatttgaaaatgaatgtttctgatgtcaatcttcccctttagatcatttggatgaattcctaaagcaaatgatatatggcaagctgacttcatgtgtgatcacttttcttgttagaaataagagagaaatgttaaatctttccatgctaataaaactcaaataaatacatgtttatatgattcctttatcttcttcaaaattgctctgaaaaatatcacccattcagaatgggtgcttatagacaggttaattaatttttgggatcggacacattccaaagatcttgaactcaaagaaatctgactggtgtgttaaagtatcttatactatgcctttagttagtctgtttggtttaaggagtccttattcattttctcccaaattgaccatgtttcttcagaagacacagtacagatatctacccacccaataaagagactgaagggacactagaccactggaacatgtggctctggcaggacaaacttctgttacaataaatcttttcatcaaaagctccccaagttctaccgacacgtgggtggtctccgacagctgcccgagttctgcccacagtgtggatggacaaaataatacacagattgtattttttaagacttatcttatcggacaccttccattggtgtcctcccttgacagtggatcacatcgcaccactggagcaggagctaagggggaaagggggtatttcctggttgtcctaccttaaatatgagtctctctgctatgtcacttcttgcctggatcaccacttctctatatttcccagaatcctctttgactcctagtcctgcctaacatgctgcctcattggccaaacagtactttattttatcatccagtaagacaaacacacacacaggagcacttgccccatcacagactatccttctctaacagctgtttactgtttatgtaactcatgtgaagaggctttcctgactcttataagtttcaactttccccaatgtaatgtttgtgtaccttgagtttcatgagcctcccctccatcctggagggaatatttcaattcaagggacactgccataagcactgtgtagacagacaatgaatagtgtggcaggaaaggagttgtaactatgatttagtcaccaagctaaggattgtataatggaaaaggatacagcactaggttgagcccaactgacaccagagaggctttctcgagcagctgataggaacaaggcagagacatatagagaaacattaggtggaaagagcccaaattggagatctccattgggttcctccccttggagctaggagaacatgatggaagaggccgagaaaggactgtagagccagaggggtcgaggataccatgagaactcgggttcatgtggctcacagagactgaaccaaaaatcagggagcctgtatgggtttgagctaggtcctttgcatataggtcttggttgttagcttggtgttcttgtggaactcccaaccgtgggagtggggctgtctctgactttcacctgctcttgggatcattttcttcctactgggttgctttgctcagccctaatgagtgtttgtgcctagtcttactgtatcttgttatgtcacatttggttgttaacccccagaagactgctttttactgaagggaaatggaggaagaggggatctggtggagagatcagggaagagggactgaggggagtggagggaggggaaacttcagttgggatgtattgtatgagagaagaataaaccaataaacaaacaaataaatgaaaagttagttgacctatatctatggtttggaaattcagctctagactctgcacattttgttcaactgccaagcttgagaataaggcaaaatagttactttgaagatacttatttattagatagtagttatgattacttctcttgtttcccttttctcctttctattcataaaattcccttgcagttgtacacattttcagaattccagttcggcttcctttctctccctctctccctccatcttttactccttccttctttccttccttcttcagggtcttatatgcatcctatgttggctttgaactttttgtagccaagtacagccttgaacttctaatccaccacctcatctagagtactaagattataagtaaacacaccatcaacctggttttatgtggagccatggaaccaatccagggttctgttcatgctagccaaacactctatatccctcatcctctttcaaggatgtctttcctttcacagatagacaaaatgactaaatgctgaccttgagttacagtgtgattgcagtttgttttcatcagtaaaaagacatccactatgttataaatattggtctcaagcttggtgtttcaagttaatcccaacaatagggtgcatagaatgctgagaattccaatgtcatttgttggtaaaataaacattcttatgaacagactgctggctattgtgattcactcgggctttctagaaggcaatttggcaaaccatatatgtcaaactattcatgagtttggctgtagtgattcaaatttgagggattttagacagaagaaaatgaacatgtgaaaagatatttagaagagtcattgtactttttgctttttgtttagcagtggggcattagagacaacaaaatagaaagactttatttaagtaatgcagacaactaaaaactattaattcattaaattaaaaaggatcaattagagtcatcttaagtgagaaatacacgatgactttgtaaataagtttatatagaatgtgcaaaattagcagtatttttgtggtataagtatgaatcatatttttttctgagttttatgatttattttttagcagagagtgtgtgttattttatttctccaaattaaaaaagtctgacactattttgtaatgataagtctttactccgtctgcccgagccccaccaacatgtgggcacccagaataacacacagagtcttatattagttgacaatgctgctggttactaggatttctatatgctagatcagtataaattatcataaatctatatattttataagacttatcttattgaagacacgttcccctggtgtcctcttcccaggatcatatggcagctccagagcagagagctggaggaagagaaagagaaagaggatgatttccttcttgtgcctgcttatattctgagtctgcctgctatgttacttcctgcctggatctttttactacatttcccagaatcctccttgactcctagtcccacctgtcttgctttcctattggctaacagtactttatttattaaccaataattcaaacatatacacaaaaggacctctccattatttcctcttttctgtctaaataaaaggaagggttttcattaccatttataacctaccccatttaatgagaacaaacatttataaacaatatttgcaaatttgggtatcattcattccaaactgcttcctgctggttgggggtgatgtccataccatgtggttgctgggaattgaactcaggacctctagaagagcagtcagtactcttaacttctgagccatctctccagcctgctagctcagtcttaattatcataaatctatatattttataagacttatcttattgaggacaccttcccctggcgtcctcttcccaggatcacatggtggctctgtggagaagagagcaagaggaagaggaagagcaagagcgatttcctgcttatattctgagtctgcctgttatgtcacttcctgcctgtatctctttactgcatttcccagagtcctccttgactcctagtcccatctatcttgctttcccattggccagaagtactttatcaaccaataagacaaacatatacacagaaggacctcccccatcatatgttttgaagttaaatagacaaatggagatttggcggctaaagttcattgttcttgttgaatagagtgatggtcaagtaagcaaatgtcaaaaggtacttagcaattacttttgctctccagtcacttatccttctgctgtggagaacaagacctctactagctgaccacactcttgttctccacagcaaagggataaaatattatgctgtcaaaaggatggggcataaagagcatatcatttaatatgagaccagtgttgttgttgttggtttttttttcctccaataatttgactagcctatgactgttagtcttcagtaacaatttgactggacttaaatcaccatggtgatacacttctgggtgtatctagtaggcatttttagaaaagggaaaacccactctgaatgtgagagggaggcatatctcctgggttggagccagactgactgaaaagaaaaaagcaatctttgtaacactgtccttccttctctgcttccttagtgaggatgctctgtaacttgtgacctcaggctcctcccactaagccacctttgccatgtggactgtacctttaactgtgaactaaacaaacccttccttgtaaacagagagggagcttttctatcctgactacctgatctcaaataaatatacagaagcttatgttaattacaaatgcttgactgatagctcaggtttaatgctaactagtgcttataacttaaattaactcatttctgttaatccacattttgtcatgtggctttgtgactttacttgttctctagcatatcttgttctcctggtggctggctcacaactccctgactccatccttcttcctctctgtatctttagttgcctagtcttattctgctttgctataggtcaaattagctttattatcaaccaataggagtaatacatatttatagcatacaaaagtttatcccacagcacttcttctcttaggatgcttcctgtcaggtggttgttaactgtcatgagaaaattataacacaatcttaacagagatgcaaccctgttacttagtttttgttggctgaaaaatagtctagattaagggagaggaggaaaagaaaatgtgatggaataaatatcacattaaagtagagagaggagctatctggaagaaggaagggagccaaccaaagggaatgaagcatgggagagggtatgaagaagaaaaaagcaaaaaaataaaataaaataacatctttttttaaaggatttacaactttcctaaaattgggactcatttttgttttagactgtgatactctttgaaatttctgatgaactctgtgaataaacacatgcgcatgtaaataaaatacacacacacacacacacacacacacacacacacacacacacgtatcaatgcaaacctgtgcacacactctaatatatagaatattgtattaaatagcaacaggtagaaatttccagttttctttatatatttgttatgtattgtgtcatttgccacaaatcatctcaaattcagtaattcatagttttgcttctcttacttttgacacactgaagcttcaaactataggtcacttatatatccaagagccaatgtgatgttacaataggtccttctgactcagaagccttatcagcaagtaagtcatgtacacattcatacccatgtgcagacacagcttaagaatgtatataaatttcctaaaaagaatatgagagggaaatattaaattcattcatactataggagttgctaatcaagtgtcagggacttcacatttgctcagctgctaatgtgtacaacgccctcgcttagattatcatctcacctgatcttcaaaaaaatgacacactggtgtagtctttgtctttctgatgagaaaatgagtgttccaatcacttactttatctatacaatatttgatagtcagtatgcagacaagtcatgactggaactcaggtatctttaactctgtgacttttaatagcaccgtgtttagtgacatatattgctttttgttcatttttgtttttcttaaaaattgattttatttatgtctctgcgcatgtcattgtgagtataaactacatgcgtgtgggtacccatcaaggccagaagagggcactggatcccccagagctggaattataggaggttgtgagcctgcaggtatgagtgctgggaacacatctctagaggagcaggaaactctctttagtgctgaccaatgaccctagcttccctgtgctcattttcttcctaaagtattagagttaaccattgctcattttattccccctttctatttgctcactgaacattataatactagcttttgtaaacactcaaagtcttagtccctttttattcattcctcccaatgatttaaattcaaagactgaaaaatcagattcttttacattcttatgaacctgaaccaaggtttcagacatgtaatgaaagtttctttgaaggagtatacctagcattcaaaaatgtttacttcatgtatttgtgtatctattcattgtgcaaggagataattgtcatatgaaagaatattaagcacattggtaataattgctctatctttgaattttccaatgccactcctatttggagtagttaattttacaatcacaattggtacagatactacttagttctatgaaactgtgccccaaggattttctaaagaagtatttccacgaagcaaaaggccagttgaaaatgctgtttggaacagagatgagatgcatatttcatgatgtcacaagatgcttacatatcaagtgctaatggaaatacacaaacctgagattaatactgcaggcatgcatgtttggttagttgtttaagactaccactagtggcctagcttttaaattatttaattgcctgtcaatgtcttaaaacattcattatacttttcatagttctttttggggggatggtctagtatgccatctttccttatataattaaaatcatctgttgcagaagaccgtttttattaaatgattttttggagatgcatgtcttttgcataagaactgcttgcctctttcttgagctgcttctcggagcagcttttatgaaccctaggatttatatcaatacagtttccaatctcatagagcagctgtgctgatagtgaacacagtgtcttttactaactggttgctttagcacatgaatctaataagcaatctaaggagttcccggctcttcaaagatcacctgatgtgtttcctgagaatagttcaagaagaagtcatgactcatttttgtgtaggatacacatatacatatctcaagtgcatgttccccaagctattaccttcccctgtgaaagagctggctacatggcatttggaactgacaaatgtggttgcctgcttgtagcaggattgatgtaaaaattgactagatgattttatggatagttgtgtcttcttttatattgctaataaggccaagttctttgggttttcatgttttcctaccttaccccatgctacccccactgagtaaactttcactcacaattttctcttctctgttatttcattgttttggtttcaacctctaacacatccttattatattgcttcgagaaagtcacatgagctttcttagtgacaacactaaaacaagtaaaaataaaaaagttccttctcagttggtgacaatgatgaaacaagtttaaaaatcaaatctatgtcactgaacagtgagaaaaaaatgaggtattcccagcgaaaacacttacctacccacagactatggaggtaatactaaaaattaataaaaagctgttttctttctaagataattagagaaagtacactgtgtatgatagttttttgttttgctcatcatgaagaaccacagtggatttattttgtgttgatgcttatttatgactgtaagaacacagcagaattagaatgtataacctgtggctatgatgttggatcactaactgtgagctgaaaatgcagagtagtgtctaactatattcataaaagatagtggagtgttaatgggaatatgaggactcttttaatgctctaaagttaataataattatgtaaatgcatacattattactaattttttattgaatgaggaagcaaatcgatcacttaacaaataacctttgactaaattgtgtccatcatttctgcatggaaatgatgggacacactattgtaggtatacggagctcctatgggtcagagaacaattggtgtttcatagaagtttccaagagaaatttagtagcaggcaatgattctttgacaaatagatactaaatgataagatgatgaattttgtcatttgtccatttactactccctgaagggtgaataaagtatcatagtctaagtttaaatgaactgactcatactttgcacagctttgctcaacaatgctaacagtcaacttggccctgtaataaagcagtgctgaggacttcttgtgtgtccactatgtgacagtcactgctgggttcagcacacatgcagtctttcctctcagaagagtggacaaggtgtgaattaacatacccactctaaagtagaagcccttgatattcagactggcttaggaagtgctagaaatattctctgatgtccttaaactgttaccagacagggtgaccatcctatatatctacacagtaccatgtttctgttatcacagactgccctattctcttctactattgtgatcatttggatttttatgggttggtattcattacagagcttaagcgctcctctaaaccacaggattccccctgccccaagtcctgggattacacgtgcataccaccacacgcagctctgctctatgtatttcaaagagaacttatttttcaagaagcttcagttgatagcaatgttaaatagtaaagatcggagagtttcccctatattttctagttccacacattcatagactcctcaaccatcgaagtcttatactagagggctatacttgttgcaaatgatggacgtatagtgatacattatcatccacagtacatattttatatcgggggttcattcatagtattatatgtttattttttaataaacataacaaatgctttctattatagtgcataaacactactttttcttacactaaaaattctgtgtcctggtcttgccacccctgcccctaatcttttactgtctccacagatttgccttctgcagaatgcaatatagtgaaactgtacagcagaaagtctttctgattgtcatctttcactatggggcactcttttaaattttcttcatattatttcatggttcgatacctcatttcatttcaacacagaataatactcctttgtttggatgcaccagtgtttattttttcattaatctgctgaagtctattttggctgcttcctataacatagggccagacttccaactccaatttagatgacacctctaagaaggcatgtgactaatttagaatatggacccaggtatctctctgaagatcatatcatattatgacacaatgaatttctgttaccttaaaagtttattattcaccccaagtatgcaatatcattaactgtgctgtataaccttaactggccttcttctcagcatacatagagatgcctgaagagaaattcctccttctcagccccaggccaccatttgccttcactgttggttggcagaggtcccagtgtgttgcctgtaaggcctatagctgttcatgtttgtcacctggccttgaattctgagtgcttataaagagccaccagggactctacattattgtggtttgcctgacccactcattacctggtcactgtttttgatgtcttattttgtcattttgttttgttccatgtctgagagttgagttgcccagggaacaactcacttctttgggctttgaaatccttctccatctaagatcctatttggaaaaaggagccaggagcaaaagtgagccaagattttaagtttctatagtgaagtcctagttgattttgtctgcatttcttattttgactttggcccaatctgctttattgaatagagacaagcacaaatcttaggttgactcatattctataacataggtaggcctatccaggtaatacatttgactcttacactagttttaagtgagcagtaacttgtaccttgcttggggctaagtgaagctgagctgtgtgtgtgtctcccataggaatctgagcctgagtgtgaagtttcccctttcactcacccactttctttaggaaaccccacaagtgcatctcccaagggctggcatttttttttttctgttaagtttcaaactagtgtgcaaaggtctgtcaacaaattagggtaaatttgaacagtgcttccaagtgatagcctgggccagtcacatatctttctgcaagtctttatggagggtaggtagtgacttatccttagaagtgttctgaaatgccaacagaagtataaaggagctccgtgtaaagtacaagtcatgtactgtgtaagctcttgactgctgatcaagtggtctgttcacatggtgttttagtccatgtagtagttcctaagtttattttgtacttaatttctcatacagctaaggtgaatgtgactctcatctgctattttgtcccatatagcaaatgagagtacatgctgtagttatctcctgatgtagccatttatgtgcagaaatttgcttgtgaaacaatgagttgcacacaatctttaaaaatgtattttgaactgggcagtggtcgcacatgtctttaatctcagcactcaggaggcacaggcaggcagatctttgtgagttcaaagccagtctggtctacagagggagttccacgacagctgggaaacccagaaaaatggtctcaaaacaaatgagaaacaaaaacgaagcaaaagtattgcatttatttctttattttattaatgtgtgcgccaaaggcgtctactctcctctgttacacctgagacatttagaatgtcaacctgagtaaaatatggaaaacttgctgtcttcattaattttgtaaaggcaatgtgcttatgtccagctttgcaggaaataacatttataatactgatattcgagatgactcatctgataaggggttttctttagcaaatacaatcacatacatatatcactaaactacatagtttcacatatgtactcatgcaaacatcatgcagctaatagtctttagatgctaagaaaagtgtaagtctataacaattataagcaatttttaattaggtctgttaggctggagtcagtctgaaggtatgtcaagtttttttgttgtagttgttttgcttttcttttattttcagattgttctgtaattagctttcattggtagacttacttttacttctctaaatcattttgatgcttgacattgtttttgactaaagattgtgcaacattgtggatggtggggaatttccttctgacaaaactgggaagctaattaagtgtatctgtggctatttacaaaatagctgccattcaattagtacatcgggtagatggcccttcccttttccttgctcatataaaagagatgctataacataaaacagttacagtggacaagtagaaatgcatagcctttgagagaaatgttaccatcccaaaacttgcaggatttaagattctaggatactttcaaatatttaaaatgtgttctgaagagcaaagattggcttcctggggaagaaatgttttgctggatggagtagcatttaagctatttttaaatttatttttatttaaattagaaacaagcatgcttcacatatcaatcccagctccctctccttcccctcctcgccaatcctctaaatcccccaactccttgacccattccccctgcactcttcagggaggttgaggccctccatgggatccccaaagtctgtcatatcctcttgggcaggcctaggccctcccccatgtgttctggctgagagagcatccctccatgtgggatgggtttccaaagtccatttgtacatccattgattgccaaggcctcctcactgaaaccctagttcagggggtctggatcagtcccatgctggcccctcagccatcagtctggggttcatgaactcccccttgttcaggtcacctgtttctgtgggtttcaccacagtcttgacccctttgttcatcactcctccttctctgcaactgggttccaggagtttagttcagtgtttagctgtgggtgtctgcttctgctcccataagctactggatgaaggctctaggatggcatataaggagtcatcaatctcagggaagggtatttaagatagcctctccactattgcttagattaccagttggtatcatacagtgggaaattaccaatatggagtcaggtagaaatataagggtatttaatagggaaaagccttacttacagagcaacctagccagccggcatggcagcactctgtccaccaagtaccaaagtgaaaccgaaagagaaaacacagtcacactacatcaccctgaccacgccctagcaagcatggtcaggcacacctgtagccagcccctaagtaggcgtggctacagcatcccctacagtgtcatccttgtagatctctggaaatctccctagtgccagatctctcatcaaacctataatggctccttctgttatgttatctctcatcctgctctcccatttaagctatttttaagtaccgtgttctctgtatataatggttgttagtagaatgcttccttttttgatgtgtttttcttttgtaagagccacatctcagttgtttcagtcaccaactgtctcggggaacctgcatgtgtgtttatatccatgatctcaaatatgagtgctgtgggtgtgaaaaaaactatcaattacaaagcttttcagttatgctattgtttaaggggagctgtttccccaaagtctggagcgaaattatagcaggtgcagtttcaagcctctacaattatcccagattaccttttcaataaaatgttgacagctatgtgaaaacaatctcactaggctgacatttggaagccgacaggcactgcacactgcatcatcacaataaagcagtctgggaacaaaaatactctattttattgatggaaaattattgctttcccaagcatataaatatttagctctcaaataaaggtcctcatagaaactgaggctaatataggaactttaagtagtcagtagtcacacctgctgttagcattgctttcttgctgatgaccaaggaacacaggaagtagagagtaagtctctatgtttgtaagaaccagtgccagagaagatgcttatgtggaagaggttagaagcacttccaattccatatgcaagaaaatcacaaaaataatgactgaacattcatcattaattatgtgtgcagaattgggaaagcgtttgccactttctttctcattcttagggttcatgtataaaacgggtctccccacagggttctctgattgaatcggtagtcctcagtatgtggtgctcttttagggttctgtggaacttttaggaagttgggcctcaatgaaggaagtggattgatagagggaggacctaagtgacggaagtggattgacagagggaggacctaagtgacggaagtggattgatagagggaggacctacgtgacggaagtggattgacagagggaggacctaagtgacggaagtgggttggtacagggaggacctaagtgacggaagtggattgacagagggaggacctaagtgacggaagtggattgtagagggaggacctaagtgacggaagtggattgacagagggaggacctaagtgacggaagtggattgtagagggaggacctaagtgacggaagtggattgatagagggaggacctaagtgacggaagtggattggtagagggaggacctaagtgacggaagtggattggtacagggatggttcttgaggtttatagcctgggcccacttcctgtgccctctatgcttcctggtttttaaggatttaagcaagaagtctcctgttccctctgccacaacctctgcagatgctatgccttgaccaccatgatgtcctgcccgctcaaacaatgagccacatcaaaacagaaaacaaagaacaacgcttatctttcttgaatcactctgccgagcattttgtcacagtgaggtcacagtgacaagccatgagatgaagatacccttccacttttctctagcacccctaccttccaccacacttagtttccttctacctcagatgtaaaaagaagcccagtgaaacccaaagatacgaagctgtttatttgttaaatgcctttaagaagtgttagaaaaaacaccaagagacagatggagaattctctgtaatcaaatatttaatctcatacaaacctttgcccacttaatgtaaatcctttgtaaagaatacatgaaaactaacacaagtaggttactgcaggcaggacaactccctttctcagtagatacaggtcatatatattgatatttccctgtgctttccatgtgtcagcttctttaatccttgtaaagtcagtagaaaatgttattgattgtatggatattgttatcacagggaggttaggtgagttggcccaagtcacacagctactcagtgacagagcttggctttgcattcaggcaacatggttggagtgctctttgactcctgagttatatcatttcctttcatacaaaagtaagactttgctgcccaaagtatgacccttagatgaatgacatgaccatcatttggatctataaaggtcacatctggagctttactcaggacttacagaaactatattgtaaaaggattaccagatggttcttacacatgcttacataagggttccaagtcagtgctttatagatagaaatgtatttacaaatagttttgtaaaaagcaaatgctctacttccattcaactgcctcttaattctcctttagtttttgaatgtattaaaagatggaagagcaaatctgagttgttctctgtggtcttgttcttgaggaccagttaggagcacaggccatgaaaatatatatgctgtttaatttttcatagatggatggttcttgaatataatctctggagcagtagccatcagaatgccttgggaatttcttaggtttatacattttggcttctgaatcaagccctgttatggggtgggagcctgtaatctgtgcttagaaaatcctccaagtgacattggtgccctctaaagtttggaaaccacttccttagctcttccaaatagcacaatatttgagtattactagttatacttcattgtagagctttcatgaaaagataatacctttgttttttataaatgagacagcttaaatttatttttacaatgtgccatgtaaacccctcatggaaaagctccagtcctaaacataggctcatggcagcttcttgtagagcatgcaagtctttggaaagggctggcttggctgcttgcttctctatcagcttggctaactctttccctatccgtgttgacaattcattcaatgtgggtgctcccttaaatgctcctctatgaaagaccatcatttgtgtggttgtctaatgtgactttcctcctgctctggctgagtttgtcctttgaaaggcctctgcctaccccatctccccagcatttggtcccctgaccattcttcagaatctctgagctcttttctaataaagagaagtgcatgtatgcatgcaggctgcacccttgaactcttccttccttctgcctggaacacccccgtgtctcagctggagatgagtagctttctggaaaattggccacagaaggtccccgcccctaatacttcaatgcagatctctctctctctctctctctctctctctctctctctctctctctctctgtgtgtgtgtgtgtgtgtgtgtgtgtgtgtgtgtgtgtgtgtgtgtcttcccctgcttctctgctgcagctgatgtgcctctttgctgttcagctgggagcataggttcatcatctctttcaaagtttaaaacaataacaacttaatctgtcaggaagaatgaaacattttaccttgtgttatgtacattcttttttttttttcaaaaatcaatgccagtgtattttacacctggtgttaagtctttaaatgactgtcactttactagttatcggagtaacctgattgaacagtgaattcaccccatcacttgtaatgagttacagagagatggttgccatctctaattctggcaagtcacctttctagtccatgtgttttatcacggcatgcttcctcggtgagatgaggagctgtatcccaagggtagctattactgcacagcttcattagagtcaattatattgctattaatttaaaaatagttctaagctgggggtggtcgataacacctataatcctagcacttagaaggctgctggaggaagatgctgtagggatgaagccaatttgggttataccagtaagtaccaggacagagtgagacttcttaaaaaggtcaaaaaacttctgttggcttcatagtttgctataatttgcctataaacatgggattcatggcaagaatgtgaagacaaaaagatctgtgtttttatagctttctaggacctgactcttggcatctctggagcacgagtctttctttctggggagcatccagggcagtgaagggaatctgttcaaggtgatttctctttccagtgcaggagagtggggagactcccagcctgtgctgtcgctccatgtaggttcatggtttctgaccatgtattccacaggcctttagacctgggacaatttgtgtagttaatatcttgctacagctttgagttgtgagtaaaagatacattgattgttttattaaaagtcaaagaagtcatagttataaacaagtacatagtttggggccttgctttttatctttccctcttaatattgaaagaccaattatgtttccaagggagaaacacttacttgtagaaggagtgcaaactagtgtggagtaatgcttaaaatgaatgctcttctaattttccaggattcagtttattcggatgctattagcattttgttcacctttaggctacaaaattgtaattttattatctttattagaaaacatttttgaaacacaaacatttttaaaccagaaatcttttcaattctccctggtgcatttcattaacacctagaggagatgggtgagtcctaagccatccctgaagtggggtaaaagaatgggtgttccccccataagcctgctcttttccatattcccaaatgtgtttctcctatgaatctttctttctccatgccagcatgagtatgaacagctgagtgtgaaggctgagtgagtgtgaatggctttgttcatcctgattattaattcaggattataaaagtaatacaataaaaaacgcattacaggcaccaaccactgaacttaatagttattggaaagcaaatcaaaatagcaaaatttgaatatgaaaatattccttgactccaaattaattgcagttgtaacagctcactgtctacttattgtatggttgatttacaataaagatttcaagtttctatttggagtaggaagtgacaaaatccaagaaggaccgaggccattgctgatcaccatctttcctctctgaacatgagttgatggctcctgacaaactgtcattactgttcagtacatgcttgtatttgaaaatcatggtccactcctgccatctttaagtacccaaaagccaaattgatgatgacataatacagttaagggaatgtatattgctgattttgtcatttttgttacttattcagccaatagactataatcatttttcgatgacaactctacttgttctatctgcgcttactggcatgtggcttgtagtagcatgtgttatgaactttgggctgtaccttctccatctcccatggtattgcaattttggttatgcctaagaaaacagatttgaaattactttaagtcagtgttaaatattattgacagaatgagtgtgtgtgtgtgtggggggggaagagttagagatgtggctatattagaatgacatgagaaatatttgtgaagtcaaaagaggaaaatgcttgtcaatgttttgttagtttggggtaagaggtacttaaattgttggcttgatgatcacagtagtacaaccacggatgttgggactactgtttctactctgaggagggagagagagagagagagagagagagagagagagagagagagagagagagagagagagagagattccttttttggaatctttaggagctcttgactctgagcaaaatcaagtttctttattatgtagataaaactcaatggtaggagaaaataaaatttctcatttgtaaatgtcttccatgtcactaagaacctgactgtttgggtaattctcccacctggaaagtatgttctcatagagtcagttatacagccataacttaacttttaaaatctctgcattattctaaatatttgagccacatatctgaaaactataaaatttcaatcaaatgacctaaacatttcagtttaattttaattaaagtgttatgtatttgtgaatttaagccatgattgtaccaaaattagcagtctatatgccatttgggactcctctgggacttcagatagatcataatcaatgtacactaaaggtggttgtcccttgattggtcacacaccctggaaggaccagagagctgtgtggcctttggacactgggaatgcaggagaaggtggtggcagacttggcaacatattcataaaggtcagagtcacttaaattcagaagtcactctttggagtttaaatacccaggtcttcatctgttttcggtaaatgcctattattaagtattatgaagaaacagaggtgaggcttggttttctttccctccctctgtctcttcctccctcctttcctatttttctttttctgaggcatgctctcattatgtaactctggctgtcctgtaactcattgtgtaggccagactgccctaaaactcacagagatccacctgcctcttcctcctgaatgccgaggttaaaggcattcaccatttcgtgtacactcagctttgttcatcaatatttgataaaggaatggacacaactatgttgatcaaggatggcttttattaaagtctgagtgtatgaaagtctagctaagaataccaaaatactatctcctgcttttacttaacaaatgccccacagagctcagaacatgctgttagaacgttgtggtaatcagcagcaaatcttcagaggctgcttagtcaggaggtgaggcagggccttggaaagaaacctgctgagttgcctcaggaatgggtatgaaatgacatgggggttgggtgacatggacaaggtgggcctttggtttctgtagttgagtgagttagtcactgggcagttggactgtacttgcctaaccccactcagaaggctgtcacagttgctgccactgtgtgaaaatgatgctaagtgcaagaaaaaaagtatatttaatgtatttaaatagaaggtcatcgttgtcggcatcttccagaattttttctctttaacccatccatgctcttcttgtaaaatctagttgatcctatttctttcatctctataaaaataaaactattagtttctatcttgcataataacacaaccaccccccattcatgttgaccaagctcatttttttaaattgttgttgaatgctctattttctttgcaacacagtgaatctctgaaatgaaaaaagaagaaatcacaagaaggaaaatggcattctcatgctgtgccaaaagcagatttgataatgtgaaacagtagaagagctcggtggacatttcttgatgtcatctgccagtaaagatgttcaaggagttccttttcttggagatttttcaggaattctggtgaagagcaaattgcatttttttatcaaattatatttaatttgctaaagcaaggatgagtccaaaactccctttttatttctgagacttctcattcctagaaaataagagccaaataggaccgcctctgcttctttagtaagtcctaccataatggaccagaaagggccctggagttcatatttatgtgaggaaacaaaggtttcataaattatggttgttgaatgtaagcttcaaataatatagaaatatataataaaaatagaaacacttctacagcatgttcacagtgggctctaaacgtgggatatagtatgtgactgatagatatgtaatcttagtgcttcattttcttcttcaagaaatataattaaggattcatctcagattggtctcagattggtgactaccctaactatcatcaaagaaccttcatccagtaactgatggaagcagatgcagagatccatatccaagcaccaggctgaactataggagtccagtcgaagaaagggaggagggattacatgagcaaggtgtgtgtgtgtgtgtgtgtgtgtgtgtgtgtgtgtgtgtgtgtgtgtgtgtgtgtgaagatcataacagggcaacccatagagacagttgacttgaacttgagggagctcacagattctagacccacagttggggagcttgcgtgggacagaacaaggatctctgtatgtgggcaacagttttgtagcctagtctgtttgtgggacccttggcagtgggaacaggttctatcctgagagcatgagctggctttttgaagcccacttcatatggcgaactgctttgcccagtgttgacgtgggtgtgtctgtgggcttggtcctgccgcaactgaatgtgccagtttttgttgactcctcatcgtagactttcccctttctgaggagttgaatgggggtgggttggggaaggtgggtggaggggatgtggggagggagggggaactgtagttggtatgtaaaatgaataaaaaataaaatataaaaaattaagaattcattgaaaattcagcctctaacctgaatccaccatcagagaaagagaagtgttatgacataaggagtaactaggaatggggacatcttcccttgagagtataaattttaataacatttctgatttaaagtcgcatagttcaatatgtaaggaaaatgtattggtatgacttttctgaacacatttacttgaatttcagcaaatatgaaaacatatgctattgacatcttggtgtagtgtttagggatggggcctcaccaactgacaaaagggactcacagatgcagtggccattttcttaatgagattcaagatgaaatttgttgtcatgcacagatgtgcagtgacatttaccaaacacgtgccgatggttttgaattaggcacaatgtttgaatgtgccaaccctcaggaaatcatgtcaccacaaagggttgccagccaatccatctcagtagcatgtcagacactggagtttttgatttatgacctgagtatgatgcatttggagcctcaccgctgtgagatggacccttctgtgtgttgaaagctcattgaacatggttctcattaaagtcagtggctcccctgcctctgttgtcctctcttaaagaatcacaaactacccatttaatttttttattctacttctttcctgggctttgacatcaattaaattaaatggggctatttataatattaagggctcctctgagatgaaaagtggagaggcagttataccttagaatgccaggcaagaatatgtatgagtaatttggtatttaagtatttattggccttttattgtgtagaaataaaagatgaagtcacatttctggccttccaagtcttctatgctgctataaggcagtgctttgacctttgtaccttaataccacacactcagccattctttatcctaattttctcttttagcctcacagcccacataaacctgggtgccctttttctatactgagttagtgaagcaaatctgtgaactgatctttttgaagtccattaaaattcattgtcaccaccctgtagattagctaaatataatacatacatttatattaaaggccactgatgactagactatatttttatgtcatccatgatttcaaaagtcattgttaagaacagttccatttggcataacattttatttctatttcctgtaggagagcattagtaagatcttagaacagtccctcaaggctacacagtcttgtaggatgaaagcaaaatgcccacacttgtgaaatttaagattattgtctctgattatagcattctgcttcctatctttgtttcttttggttccatcagtcaaggatatatcactttgttaacaaacatgtggtatcctttcttttccagatatttgccccttccacttcctcctctactttttttgttgttgctatacatgaatctttaatatctgatctgggggctggggctgtgtttcagttggcagaatgctagactaccttgtaggtagtttaggtccagagttcacttcccagcaccctgtaaatctggtgtagtggtggtgctcaccagtaatcttagcattcaggaggtagatgcaagaagaagaggcagtacccagggttactttggttacacagagaactcaaggccagtgccagctcaggatttctactaggagctgaagccttcatggttttgcttacatatggccccttatgagagcctttacaacaggtgctgatgctgccttggatgccagcttaccatcttctgcttccttggtagtctttccccttgttcctgtctaaaggatttctaactccctttgcccattccatcagcagagatgtaacagtggcaggcactggagctgaccaatcatcaggttctttctaatttctttcagctttcattttttgctctttcttcagtaagggaaagtcctctggtcaaagataccccttgataaagaaattctgactctgtttgcactgagaagtataacaccttcacattggtctcaacataaggctagcatgtccaagacagacctaaatcctttctaaagaaggtggagagctaaacatctgaacttctaatgtagagtctgtctctgaacagcatttttttggcataatgcttcccagggggatgttgccacagactaattatcattaattacacattcaggcctacagttcatccttcaatccattgctccttaggcttatgcaaaatcttatggtccagtcactcctttaagttgatccaaatctgttccccatacgattcatttacatcttcttcaacatttgtaaagttgccaacatgaacactttgcacccgagaatcttctcagcctgattcaaccattgctatattctgcctctgtctttaaattgagtcttaattgccaactctttcaactcttataaccaatctcagttctatctttgatgaatcaggaaaaaatgactcttaattcatgagacattatctgatggttgtttcaaatttaacttgacaaggagcaattaggaataagcttggaatggaatgataaaagtactgagtatgtaaatgaagaagaaaggttaaggaaatagctgtagtgttaacacaataatggagagcaatatctgtttctcatttatgttttgtgtttgttgacttatttttttttgagacagggtctctctctaacccatgctagttctatcttgaagttcagataaaatgtagtgattcatgtatttagtattccagaaggttaagtaggggactactgaatgagttttgagaagcagggagcttcatttccttaaaatgaattggcttttaacttccctgtgtctcatgagcacttcataatgtgattatacaatttaatagcctaatattaatggaatacttatatttagcattttcacatggactttgtactttagactttacatatctattattaaatcctcttttcactactgtttcctaagttgtagccgtgttaaacagaaattcatatattttccagaaaatactactttcttcctgctcttttgtataatgtacctgacctttgccacatgccaaggttgtcacagttgacctaagggttagctatatggttatatagtaatgtaatatatatattggttttcctagacagggtttctctgtgtatccctggctatcctggaacttgctctatagtcaaggctggccccaaactcagagaattgcccgtctctgccttccattatatttttgtggaagtgtattattacagtactccttatagtttaatgttgatttattagatagaaaatgactttgctgtgaacaaggcctgtgagaagaaagagtaggaaacctagggaacttcctgcatcctgtttgtcattcccagaacttgttagtcttcagagtctgtgcctttccatttatgcactttagccaaaaagcagtgagacagggccagaatctgtgtaagttaaaatgactgattggtctgagcttccatttacacccactccagttgccgtccttaactgctctaactggagtcaggacaatttgctttgctgtgacttttaatagtgaattctttaacacttctgcatgaaggacaagtcaggagaaagatgtgtgaggtgttctgaacttacacaggaggttccttcagcacagaaggtggtttctggtgaccccactcatcaggaagggcattccagatatccaaaaatgttgtcaggaggacctaagtgccactggtgcctcctattgcattgaaaccatgtgtaaaatttgcaggttacttgtatttatgtgagttaaagcaattctacctacctcaactacctcataaaaattatattccatttgaatcctattgcgattttgaacatttaataaagatgaagaggtcattgatagggaacagataaattgactgaaggaagttaaattgtactagagtctaagaagcacatgtttgtaaaaagaacttggctttggtggtagagtaaaactgagtctttattatatatgtgggctgagcagtaagttagccttcgtgagattcagttttcatattgatagaaagtagctacattgtgctgcaacaattattaaatattaagtagacatttacatcacgggatgtatttagtagatgttgtcataatgatatctcccataaagtttattgttatatcatcaaatcactaaaaaatatcatcatacatttgatctttcaagtatccttaacttttaaatgtaaagtcaaatttaaaaaaagaccattttgttaattgttttcaaaggtcactgcttggcctttattgagtgttttaattattatatgtatgcataatgtacttataaaaatatttatatattaatgtatttgggcagttactgttactttgcaaggtatgaagtaagacataattggatagaaagagctgtattatttctccttgctttattactggtcaatataatacactgcatctttttgaatagataacagcatagcaacattcatggtggactttctcttgttaaatttgtaataatgatgattttcacctacagtatccagttttgtaatttcctcttttcacaaggtaaacaagttagcatcaatgtatttactcagttgttaaaagtataactttcctaggaagaaagtttgcagcatatacttagaatcagcagggaagcgatttgcacagtggagactatcgtgtacagctgcacagtctccagcaaatggtcttttctaattatgaagcatttgtctcaggacatttggcagttgaaatttagcttgaggaaaacatatgcccttacaatgttgagaagcagttgtgagttccatgtagtccctcgaggtgtcttccaagctcctgattctgtcacactaagtatttgagtgttcatagatgatttcaatatgaagcaaagggcagctgcaggaagcttctagaattcttcaggcactttatggcaggagttgtcattcttcagtgttgaaaatgaaatagaggtatagttaaggattctttcttgtgattcttataggtcaacaaatgttttatgtgggtcccatctactgagatgattcactgagaaatgtctgattgatgttcaatttgacttttgttgcttttgataaatggcctgaccaaaaacaatttggagagaaaggggtttatttcactttacagcttattgtccaccatgaagaaaagtcagggcagggtctcaaggcagaaacctagaggcaggaactgaaacagaggccatggagggacactgtcgactggcttgctctttatagcttgcttaggctgctttctccttctcaggccaactgctcaggatggcactgctccagtgtgctgggccctcccactgcaatcattaataaagaaaatgctttgcagactttctcacaagccattctgatagaggcattttatcaactggggttcctcttcccagatgacttgaacttattcaagttgacagaaacctaaccaggacacttgagaaaataaatctctttgggatccttgttagaaagtttaactaatggagaaagatgctaaaacatgtgtgaactaaaaatgagttgtcttcaaacgtgagaacctgtggtgcctttgcaatgaagtgtaaaagtagaggtggtcgttgcttaatgtatttgaagagttcttggtttgtgtcattccatggtgcagagaagtctttagtagggaaatggttatctcattgctcttctagagcatctctgacctatagaaacataatatgagttagatacatatttttatgcttccattcaaaagcatagggaaacaggcatattttatttagtcaaacatctccccaaatattatcattttaagacatgatcaacatgacatcattcacgtattttcttaccgtcttaaaaatgcaggtgtgatttacatctatttgcctcattgtaagggaatagtaatcatagttgtcatattaaacagtgaagattggtggtgaacacctttgatccttatactcaggagacaaaggcaggcacatttctgaattcgaggccagcctgatctacagagcaagttgcaggaaagccagggtggttacacagagaaacactgtcttggaaaaataaaacaagaaacacgtgtatggagaatgtgaataatcaaagctgtaaaaagttttgtctgcaaatgttctgaaaagtgaaaatatgataaaaaactcaacatctaatggttaattttacatttcaacttgcttgggtggagcaatattcaggtatgaggcaaaatatcaattatggttgtgtttccaagagagactatcattggcatcagtataatgagtcaagaaagtctgatctccccagtgtgggtctagacagtgaaaaatgtagaggaaagtattttctctcttttggcatccatgattatgtgagctagtcttcatagactccatgatgagtttcctctcttctgcctgtacacaatcatgtacctgtaatgatacttgcgtcaatgacagtccacaaatgcaacagtggacccatagttacaatgcatagttatttcttactcaccctagcttatttatgtatatagacaactctgtgatggtcacacagtgatgacatcatctaaaacacagttcttaggacatgtccttttgttcctttgtagatacttgtgaaagtattttggaaaatgaaaagtcaacagaaagtgttttatttagttatctcaccaagtaaatccatctggccaacactttatcatgacatcacacacataacatgcatcatcctagcaatttaaagagtacaattctatgatatttaagtatattcatgttgctagttgcagaaaccttcaccaccctagactcaaactcggtacaaataaaatgacatcttgctattttcctcacttccagtccctagtaaccactttttattttttgatttgtctgtctatgaatttggctgtatgtatctcctatcagctggaatcagacaacattgtccattggtatattctgtatttcactctgcatgttcttaaagttaacctgtattataccatgtatctgaattttcaaaactgaataacatttgatcatgcttttattcatattttgtctaacagttcatttcccaaagtacatttttatcattttaatcctactattatgactaatgctacagtgactattggcatacagatgcttgcttgtgttcctgttggcatcgatttgggggtgtaccttgtaatcttttggcaatacgtggggtcctgatttcttcacaacttcagtaatagttattttctgtctttcattaataatagccaccacactggatattacctcctatctctttgtaggttattgctgttgagtactttatgcttccttcttagctctttgtacatcttcttgaccaagttgcagaaaaaacacactgtcctcaaatataacatgtacttgacagacactacataattttctgaaacttcatggcagactctaggatgacccaaattatttttctattaaaatatttgttctagggctcacagaaactgggtgcatttatttctagggtccaaacgtctactggactccaaaacatcaagaatagtgttaagataatttgacttttctgttacagcaagaacaattttaaaaaccttcagaggagtctatctgaaaacattgagaatatattttacatttataatgtagaagtaaaagaagtaaaagcccattttgcatatcataagtcacttacatatgagtttaaattgtacctgatttttgcccttaaatataaagcagttattttcaagtataccctcatttgcactttttaataatacaaatgcaacatttactttgctggtattgcaattccattggtgtctaggttagaccatggaaagttaggatcaaatttttctctctgacttatgtgcctgagatctacttaatgctgtttaaactgattctcctctctaacattattgttgttaccagactttgtcctttacagctgctaactgatctccctgtccctctcttctcctccttgtccttccccttcctcccattccctgcccccccaactgtgtctttacctctagttcactggtatgctactgctaatatattcttttggaagtaaattacatactttagatgcctcctctctgactggtgcagctagaccaagttgcacaggcagtcagctggaaccatcacactctaaccctacgaattttccttactagttcactttctcctctaactacctcctacctcatccaacatctcagcctatctggatgacttggggtttcctccaagtgccacctcccccactatcctgacaagtctcctttttctagtatgtcagagggatattaacatgttctagcatatctactgagtacttaattctggggaaagctctgctaggctgctgtcgagctcaggtttattctttagttattgaattgtgcatatccttggcaagtggccctggagaaatcaggaaggttgctgttcataagtagcgcaatgatattttgatattttaatatctcccatgggttcaagctagtgaaggtcccaacattactactgattttatgattttcctaaaagacttgcttggagcaggaagttctgtctttatctcctccctttccctccatggttctaggcatttattccaaggcttcacagtgctataggcagggacttcaccactgagtcacaccttcagcgcaggtgtagcttgtggatgtcaaggagttattgttagtcagtaggcagagttttcctgtcctggcagttgcttctaaattaccacacagaggcttatataaattgtaaatgcttggtccatagcttaggcttgctatctagctatctcttacacttaaattaacccgtatttcttatttatactctaccacatagctcaggcttgctaatagctatctcttacacttaaattaacgtatatttcttatttacaccctaccacatagctcatggcttgctgccccatttctacatgtcctgccccctcagctgctggctggagtctcatctgattctgcccttcctcatcccatcattctcagcttggctttcttgcctaactttatcctgttccactactggctagtcagtttgtttattaaaccaagtttattaaacgtagtgacatatattcacagtgtataaaaggataattctacagcatcaacttgatagagcatctaaatgcctgtgtgtgtttaaaagcattaatcaaggatcactggaaaataaatccatttgtattgaaactggtgaaaaataatgatgaattgggatatagcagctacctaaaaataagttaaataacttcaataatttaaaaaatcatcttgtgtataaattatatttaagaactctatagcaaaatgttagcatggtataaaaatagctgtggtttctgttgaggtttgttgttcatatttaaagattagaaaaatgctgcgtttcatctatggtgttgtaaaaataaaagtgttgtttgtatctttcacatttgagaatctcttgaattccaatggggatacagtccacctgtagagcacatgcttaacttgtaatcccccaacatgcaaaaaataataaaaaagagaatagtctgagttccatgttcttcatggtgctatgctgacgccgtcagtagtcctcattcaggcagttagaacaaatactatagacgtgcatttcttagtgttcctagaccagggcaccagcatgctgtggttaaggtccttccctcatatggacacttggtacatgtgtccctgtgtttcctcctattaagtcattcaccctattgcttgagcaccctctctctgacctcatctatatatgatcaactcctaactgtcctatctcctaatatcaccttgtttggtagttagggcttcaagtagtgaagttcggggtataaacatagtcagttcataacactagtgaagaaccatggctttgaggatcccttcattaaatcactcttcaccagctcttgtcatccatcccatcattgggaagaaactgttgcttttcttgagtatgtacaaccttgcaaacttacattagctcttgatttttcttgtctactgtaccaggaatcagcaggtgttttctgaaaagggcccataatgggaagtattttaggctttgggatccatatggtctctgtcacagttactcaattcatccacagacaatatgtaaatgaacaaggcatggctgggtaccaagaagaatttttatggacattgaaatttatttcagataattttcatgtgtcataaaatatgcttctatttaaaatttttccactgtgcaaaaaatgtaaaattcattctttgctagcagactacgagaaacaaaccactggcctgccttggcgcagatggtagtttgtgagcctgcatagtagatctcacattgaagatagggttgtggatttgtggtttttttccttccatatctagcatcagtgtctgccataaatataggctgaataaatatttgagtctggcagtgctttgtactcatcatagatgctttctctgtattcttccagaatttgaattggacagtagatgaattccttacagaaagttaagctaaatccagatttgtgattttagtctagcacaattttatgcccacatcctttggaatcttggttttctgtatgtgacagccagctgtttcctatgttgaaggcattgccattctacttgtaagcttagaaatctcagtgtgatgggagtttatgtatttctcctgaatggaacatgcctttaatgtgagaacatggtgtgctatggccaagactttggaaacatgcttcagtgcaaagaaagattgcttctctaactcttccttatgtcctttagacattataggtcttttaaattttattttatttttgaattttatatatgagtattgtaattatatcaccctctcctcttccagcttttcctgtgtactcaccacaccccttctcaaattcatgaccccttaatattgttttacacacacacacacacacacacacacacacacacacacacacacacacaaatccaactccctgagttcatttggtgttactcatatgtaactaggattgacctcttgggattggataacccatcagggaccttgttcctgaataaaattatctctaatcaactattaatttcatgtagctctttatttagtggtggagccttgggaaaactcccccctccatgttgacatgtcagttggtgctgacatttttcagatcttgtttaggcagccatattgttgacattttctggcatagtttccctgtgtcatatagagaacactatcagccagcatcctgtcctcttcagattggtccacttcttttttctgtggtgtttcctaaggcttaggtgtcgaggctatcttgtagacatatcagttgggtatgggtacctagcattcagttatgctctgcgttttggcaagttgtgaaattttggtctctgctacacaaagaagcctctttgatgaaagcaaaagatatgcttatctatgggtataaggacaagtatttagaatgcagttagaaattatactggttgtcttagttattctcttattgttgaaaagagacacaatgaccaaggcaattcttataaaataaagcatttaattggtggtggtgggggacacgacttgcttacattttcagaggcttagtccattatcattattgtgggaagtagatagaccatggtactagagaactagctgagagctttacatcttgatccataggaagcagtcagatgtgggggcagggggaacacaactagtcctgggatgggcttttgaaacctcaaatcccacccccagagacttatatcctctaacaagatcacacctcctaatccttctcaaatagttcacaactgggggctaaacatgcaaatatatatggggaccattttcatccacagtggttttgggaaatggcaggaataggtcctctttcagcaaacatcacctcacgagccacaggtttatgatactaggcacgaatttcctcctattttagtggcccttaaatctgattagattggtgttggtttcccacaggatgcaagtgctgatgggatatgttgtcattcagtcattgtttgtaggcattacagctgagtaggacaactggttgcatgtctcttttcagtactataagagctagtccctagggagaggcttgcagatttcctgccccatttctcaaagtcctgtgtcctaagtgtggtatcttaccttcagtttctggcaggcaaccaagagcatagcaatagcctgtattgtcacagtttgactgcagtcatcatgagagtctcaggtatttcattcacgtagagatgattccctgtagagattaataagacatttacgatcaaagataaataaaacagttcttttgttagtctctttaaggtaacaacacacttgcacccctgcaggtgacttaagcaagatgttaatcacaactctaaaattacatttttaataagacaggtcatgcttacctacctataaaatgccgacatcactaagatgcaatggtttaaagtgcaaaaaggctttggtatgttgctcaaggtcatggataaattttctgtttcatcaacccatgtacattatcatgaagcgatattatctgaaatgaaatttcccttagggacattttagtagcccaagtaagcaaatcattgaaatctgtaaactgatttacagaagtcataaaaaaaaaaccatggatagtgaaatctgataagtacagtttggagacttgattataacatgtaaaataatgtaggccttcattctcatgggaggatttttttaggtgaactgcatgcatataaatttcatttattaagacgtttgcctaatgcttatcaatgaaagtccatttctactggttggggtaatagaaagaaataaggaacttgtctctagaagaacatatactttctttttaaggaaacatgaaatatacatgcaagacaacaatgcaatattacactgatacatgcagacacacatggccacacagatgcacacacagacacccttccacaaaaagaaacacacaaggatatgcacacacactccacacaggcccaaattcccaagccttcgttcttatccctattgctgtcacactcagtgtgacttcctttcttgattcctgagttgcttgtggcctaactagatgcttgtcacccattgtctgaaacggtgaaccctctgaattaccaggatgattttgcttaccagagctctcttcatattactcccttgccctacagattctgtatcaactgttatttattggcacccttgctgctctgtagatcacttggctcagggctctcctaatctgtgtccctcactgtctctctggctgtaactctcagagactgtaaaggacgcctcatgtgcatctcctcagagggtggaaatattgagtcttctcttcctgcagagctatggctttaagacatatccactctgaacttctctcagtcactccatttctagttatcaactaatgtgtgtttggaaactgtgtatgtgtgtcggttaatagttgttttaaaaagtagtgagattggaaccagcaagatggctcagtgagtagcagtgtctgacaccaaagctgaggagccaagttcagtctctgggacccacatggcagaaggaaagaactcttgcaagttgtcctttgacttctacactcatgccctgacatgtgcaacctatacgtataaacacaataaaaataaaaatgttaaatataaaaaattagtaacattagttagtgcaacctaattcttcctttagtggttggtatacacatatgtgccatacctaataactgctaaaatgatgatgaccttggaattttttattttattacacataaacattttgaaacacattggtgtacacaaggcatattcttttaaattttggttatttactttgtttcttctgtttgtgtatgttttttgagacagggtttctctgtattgctttggagcctgtcctggagcttgctctctagactaggctggtctcgaactcacagagatccacttgcctctgcctccggagtgctgggattgaaggcatgcaccaccaatgctcggcttctttgtttcattttttattttaaagctctctaacagctttctgttatccatcaaatgaagtctcactttataaagctgtgtttcagagtcctgtatcagctcaccctctatgccacaagtctcagccattccgtgctgcttgatggtgctgctctccatagctcatttctagctggatgttggttccagtactttcctcactgtgtacacttcagcttcatcattccccaaggtctcccttgtggctctattctcaagtcatcctttctcgtgtcccacttctttgtttttatatcatgcagtcttacggtttgtgttaagtaaatgagtctgtcatcagaaaaatctagactgttgctggagaatacctgtgatgactatgtgaagaagtgtcacttcccaaagacatttggaaagaagccacgcatatatgacttctttctgctttcttctttttctcccttactgatttttttttaaaccactgacgaactagttaagggtgaaaccacattcaagtttcttagcctcaaagagatttgcaagaacgttaggtaaaataccagaattgggtttgctctagaatctaccattccatttatcttgtttttctcttatccctttcatattgtttctgtcccatctcctcaaggtacatgtgcattctgacgatactggtgacattctttcccttctaatccggctttctctgtttaactatgttcacttgaactgtctgctgaccctacccagtagtttcactcagtaccagctgctgttacatctcctatattttcttttattattatttttttatgttttggttttttgagacagggtttctttgtgtagctgttactgtcctggaacttgctctgtagacaatgctcgtctcctgcctctgtcacctgagagctgggattaaaagcgtgcaccaccacagtctggcttttggacatctcctatattttcaagttcagtatatgatcctgtcttttaaaattttcatacttgcacggattaagcacattagtgcttaactccaataatgaatctttgtcacactaaagaaagaaataaaaagcacttccccttgaaatcatttaatcaaatgccagttgggatctgaattatctacgtcatgttccctatgtatttcatcccccatctgtctgctgtgagtctgaatcagtacctgcctggaggctgtctgtctgtgtttgtcagttttgtctgtgttctgtctgcctatgcctgtgtcttctatctttgcctttctgtccctaagaaaggacttcactctgtattgattgactagcacggaaacaattacatgtggaaggaatagggcaccttatagaaagctctaacagagtttttacaatgatttagtcactggctccaactgaacaatatccaaacctagttgcattcaacatttatggtggatattcatttagaagattgggttcagtctctgtatttactgctttcagcaaatgctacacatgcatttttctggatcaggggtatatacgagtatgtaatttaagattacagctatgcattaatttaaatttaaaagttgattatatggaaaattcaaggcaagtagggttgattgttacattcttctcttacaagtggattaaataaacaggccgactacataggacagcagtcttaagtgacctcaaggtgtagtatcatctctggctatgaggtccagcaaaggttccatatcttagaatgcaaaagatattttcatcatattgcattaatacacatgctaacaatgtatttttctattaggaaaatgctaagatatgcataaaagtagaaaccataataagcatatcatatacttaccacacaggtttatttacaaagattttaatgtatgtttatctttcaacttttaaaattttatgtgtgtagatttattgtatgcatgtatatctatgcacaacattgcatgcctattgcttgtggaagccaacagaggacattgtatgtccaaaactgtgattacagatggttgtgagctgccatgtaggtgctgagacttgaacctgggtcctctagatgaacattcagtgatcctaactactgagctctctagcccccaatatgctcattttttaaaacataagtttaccttgataaactgttttatcacattctatagcacctgtcattttgttctcaatcttgtctattaatcatggactttaagcttcaacatttaattatacattgtcaaagacagtgggtatatgagagaaattaaaattcagcaaacatatctaataacacttctacatagtttgtgtacattactatttgttaaacaagtgctatgtagaaatggctagatacttattatttcagttatatcaaatccccaaagtgaaagttattttatttgtacttttttaataattaaaatacgattatgtgagtcattaattatcttttggttagttaccagcaagacttatttctctttttaccttatactatttccttcatgcaatcttcagtgtgtccttttgagtggatggacaggaacgtgaaagcagtagggaccttcttggtaaatcatagtattagatagaaaaccaggaaccacatgttgctgccaaatgtagctgacttgttgatgaaacaagacagcttagtactatgatctttaaatgtgtgtaaaaggttaatcattttcatatctctcatgaatacagaatctgttttacagggtgttgttcataagtgaaattctctaattaattttccctgatcactttgttttcttttttctccagctcttgtaaatgtgaaactctgggccattgatcgacaatgttttcaaacaataatgatgaggacaggactcatcaagcataccgagtatatggaatttttaaaaaggtaggacacttatttctttctttccatttggaagaatttggcgtgcctctttgaaatgcagctttgtgtgtgtgtgtgtgtgtgtgtgtgtgtgtgtgtgtgtgtgtgtgtctgtgtgtgtgtgtctgtgtgtgtgtgtgcacttgttttacacttgtgtgtgcacttgtgtgtgcatgcttttatctcagtgttaattgcctaccaatttgtggaagggtcagatgactttgggtgggctttattatatttctgctgctggttctcaggatgtgtggtcaagtcaggacatccaaattttatccagcatactcagacatgcagagttttctcagaaacacaaatgagaattacttgagcaggaaaggatgttcattctcacaatctagtagttaatgtgttgacaccacttcctctaaacagacctcagtgcctcactgagctgtctcctgtgggtttccataggaaaagtaacacagctaaggaagagacattccacaaggcatcttgttagcctgtaatcctgagtttaatttcccaagttcatttacttccagttcccttttaattcatagattattatgataacccaacatagggtaaggattttaatggaaaacttacttctcattctcaaagaaacattggcaattctagtgactttaaacatattttgtatttggacatgggggggtgttaacagagtggctgagaatgcttgccttgcaagcttaggacatagataaatactaagcatggccacatgcatgtctgtaaccccagcatggtgggggtggagctgagatgggcaggcatactgctggcgcctgctggccagccaatctgactaaaatagtgagccacaggttcaggaagagagcctgtttcaagagactaaggaggggagagtgatagagcaggatacctgatagccttttgctggtgtgcatgtgtgtacccacacagtcatcacacacacacacacacacacacacacaaacacacacacacacacacaccctgtgcatacacatcctcacctccaaaatttgtatcactttatttttaaaaatggaaacattattaaatagcaatgtatagattatgggaaccaaggccagtgcacactgaggtttcctctttgagggctggaatattaaactttttatttctacacttttgctttgtgtgagtcagtggttaaaatggagctaccaagtcaaattcacattttatttcagtaatacatcttaaaatatatctattgagttttcttaaaatgcaattttaatgtcccttacttgggtatttctgttaattaattttgtttctgcttcatcttttatacatttttcatttccacatgaaatctttttgttatattcctgctgaagggacaataaaattctaatttgatatcaagtaataatatattaaaatagttcaatgtcagtgggatgtttcttttccccttggtgtgattagatcaggagaggtggaaatataaatttcttttgaagtttagtatagtttgaaaggaaattaaattattgagatgccatatttatgtgacaggatatatatgtgtgtgtttactggtgcgtgcacacgtgtgtgtgtgtgtgtgtgtgtgtgtgtgtgtgtgtgtgtgtgtgtgtattgagagacttcgagaaagataaagaatgcatattcattttaagcctaaaagtgcacagctattgatctgacaacactctgatgaaaacttcagttagtaatcgatgaaatagctgcattcttaagttcttaagatgctgattttagctttcatgaatttgtaatctcaaggaatgggccaaatggcaatcaaatgctctttttgatgattctaggaagctctccttttctactggccctgttttaggagatggaggtgtgtgtgtgtgtgtgtgtgtgtgtgtgtgtgtgtgtgtgtgtgtgtgtgtgtgtgtgtttacagctgtcttagatttaaaagttgttttgacactctgaatagtaatggctctccagaatgagtgatttttgttgttgttgttgtcattagcttaggacaagcagaagtgacaggtagaataaaagagaagtgggcactgctaactttgatgtcactttgcatttggccactgtgcaaaaacaattttgcactgtatgttaaatagcacagtgctgctgagagtctagagattgttaagatgaccattcttgtgtgctttcattatctgaaattgtgactatgatttagtgcctccctctctacagcccttcagggactcacagttaattactgatacactcattgtctgggtgttctaggcccttctctgccaacagctgactagttttctcagcctggcttttgagatccagaaaccaagtgattccatgtgaccatgagcctacttccaggcttgcctatagcacactgtcttaactcccagatgttattggttaagtcttttttttttttcctttgtttgaatccaatacactgatgctaatcttaaccatggagctgtcagccttgtttgctctgtagttttacctctactgcatattttactgcccactttctttgattacaattttcctcctcctcttcctcctcctgcttttcctcctcttctttttcttcttctccttcttttgattttcaagacagggtttctctgtgaaacagtcttggcagtaagaccatgatacaaacgtggtacatgagctagcctgttggagcccattcctcagggatggatgcagtgctcagtggcagtaggaccacagtataaccctggtacatgaggtatcttgttagagcccactccccatagtgggatgccgttctcagtctttaatgcatgggagaggggccccaacctattgtgccagactatgttgacttctcatgggaacccttacctgtgaagaagagtagattggggataggctaggggcgaggcaagggggatgggaggagactagggggtgggagaaagaactatgttaggaatgtaaaattaaaacaaaaaataataaaaaatgaaaaacaaaacagtcctggctgtcatagaactcactttgtagaccaggctggccttgaactcacagagatccgcccgcctctgcttcctgaatgctgggttctttactattcttattcctacttttaagctataaactttttagtacaagggataattcttaaacattttattgtttttctttggcacaagatatattgttttgcaggaagtttacatgtcagtatccattcttcaaggttcactgcaatgttaatgcaggcttccacttttcaaaaattgtctaaaatttcacgatgatagcacaacgttaaatcaaagttgggttcctaatgagtgctaaccctttgctatggtgcaggtcacatgcccatgatgctcaaataccgaggagcattcattcttccaacatgttctcaggacaattattcttggtaccattgattttgtgaggcttttaaaagaggtcataacaggactggagaatgactcagcagtgaggagcactggctgctcttctagaggacccaagttcaattctccaaccccatatggtggcctacaaacatttatgtctctagtctcagaagagttgacaccctcccgacctccccaggcattgcactcaggtggtgcacagacatacatgcagataaaaaaatccatacacataaaatgaaagttagttaaaaatagaagaggggtataacaacacccaagggaaatgatgaaaaggcttgctaaaacttagaattctaaaatcaattaaaagtttatactatgaattttgcatcgcttattaccctatttgttgtttttaaagcacatttacttgccacatttgtataataaaaaaacattgacgttttgcatggtcaactcaacccaatgttttcttgaagacttcgtgttgaggaagggttacctagtttaatattataaaatggtgaaatagtttaaaggtctctttagtgctctgtagcaggtgtgggggcatatttctctctgtgccagctacataaaacttagatctgaagttatctactgttgataaagaggcaaagcaattgtaacaatgtttgaaaaagtttaggaaatgataatgtattaatattatgatatgataatataatgccaattctcagtgggagtctcatttcacatcctagcagcttcataagggaggaaattcaggatgggcagggttgaaagtgagtgagtctgtgtcagggccatctccctctgttattttccctccttgttttcctaaataagcacatacatttggagatgaacacactggtatggactcaaagcataactctcacctcaaaagggaataggagatagtttgttttgaggcattgtgggtgacacatacacttgggagacagagccaggcagatctctgagttctaggctagctgggtctatatagtgagaccctgccacacacacaaaataagtttgtccccagtaccatgttccaatgtggaaaattgtcatgagtttttcagttgcagaacaagaatccatccaccaaagcacctttcaaacacattggtagaaacatcaaatgggtgagttacaacacctcggggaaatctctatcacagattatctgatgacacccatagtttctaggttggtggcagctggtgctgtagtacattagtacatccccaagtttctgtccaatagtcatggtgatggtaggtcagacctagctagaggcaggcattaaacagttactaagtgagtaaacatagcacgaggtaatttggctctcttttgttctgcaacactccagctatcaatgttggccttgtagacttcttaacacagatatagaactttctttcataacttcagttcatgctaggcacatacatgaaaatgactagtagttctactagtagagagtgtttcctttttgtcaaagttagcttttattttgatttcagtgtatttatccattttgtaactgccattcatacagtttggcccccctctttgctgttcagtgccacatcagactgtgattctggatctttatttagttatttctattctgtgcctgtgttacacatttcctgatgtaaacacagatgtttctctgcaagcataacacaaagtaagtcaaataaagtgactaataagggaatgaaaatagctcaaggggcagtaataggaagcatggcacgatggctgtctgtcaaacaatttctttgccatttgccatggtttctagaaagtgagccagacaacttccgtagttaatttaaattgttcctctctgagcacatcttctggtgctactgttgatagtgtttccacatgcaaagaaccataaggctataactgtatgaccactgggctctgttgatatgaactgagatgttgtttagctcaatactagatggttatgactatgatgacgatggaccatagtttattatggtgataatgctgatgcttatgggtcatggtttatggtagtgatggaaattatggttatcaaccatggtgtataatgatgccaacaattttggtgatggacccttgtttatgatggtgatgatgtggtttttgttacttgcttcacagacaaaacagagaccaaaacttttctctttttttttgagagaatcattttgtaagatagatagacacatctttcctcttacataaaacctttccataagtttttatcactcaaaaagaaagtcactccggtctacccttgtccccaggaccccgaatgccaactgttccacctcattacactctcctcttttcttactttcttactgcttcagccacatggccttttgtttccttgtgttttctattttctgtcttagtgaacattatcgtctgtcttttagaggaaattttacactataatctatgaggacacactaaatacaagcactgtggctgcaaataggactggggtttaccccaagatgagcaaaacttttgatttctcttcctgatgttggacaaactatttcctctgaatgtagcatgagaacctcctgccatgaagcagagatgctggatgatctacagaagagcttgacccatagcacagtgatataaccagaataacaaaggtatggtagactctgtaataccagaacctggaggcagaggaagtaggattgccatgagtttgaatccaacctggcctatagagtgaaaccctgcctcaaaaatacaaaatagaaggaaggaaggaaggaaggaaggaaggaaggaaggaaggaaggaagggagggagggagggagggagggaggagagggaggaaaagaaaagaaaaagaaaaggagaggaaggagagaaggagagaggaggaggagagggagggagagagagagagagagagagagagagagagagagagagagagagagagagtcacaaaacccaaacaaaacaggccaatacagtgatggccaggtctctcacaactctcacaagataatgaaactatcctggaaagagaagagtgggtcaccagaaagttattggaggtcacagccactcttccatcttgtctcagctgctgttgttttaggccaatagaataaaaaggatgaggaatcttggctaggggttgaatgtctttcattgtgcagctgcaaacccagctgccattttaggaaagaggacttttgtggtgatgagtcacacataattctgtaagtaagcccaatagactcattgcttcaccactctggacttggatggaaaacttggggctattagtgtcctatctgggacaaataaacaattctttattcctcctagggaaaatcatgggacacttgaattgaatataattaaatgccaaagtttacattttctgtttaaatgaatagaaagttgaagtttgagacctttgaaggatacaggtgactatttggctttgtattcactttctaaccattaaggacattagaggtgacatttgaaattaaaactataacttccatggcctagccttctccagaaacccatggctcctgggagataatttctaaccaaagcccagagctaatggttttgtatgagaaccttttcagtattgcatataaggtgccaagataagagaagctgggtaaatcctaacgctattcagtgattctgccttgtatagtttcttcactgataaaaagtttgatttttgtactttgtagtttccgtcttccttgtctccttcaccaggaattgagtctcaagtccagtttgttcttcccacctattctctgagacaataatggcttgcatatacatttaacatatgattaaataaatgtagtatttataatttttttggaaagttaggtttattctccctcggtaacatgtataatattgagatatcactggatctcataatacccttgatgaggaatataatagcattttgagacatttttctgtggtgcagaactaatggaaagcctctctaaacctctctataaatgccattttgtcaactcatagcttctctcactcttgtcagtgtcagaagatatgattttactcctgtgacctgactgaacaataagaaccaaaatgacactgaatgtagaagaatttaaaatatagtggattcctggggagcagaaagggaatgggatgagtagggtgttagttggggggggcaggggaggaggggagggagagggacctgggattgacatgtaaaataattttcttgctaataaaaaaagaaaaagataaaatatagtgtaatgtaatctttctgtatactttgaaaatgaaccaacagaatctcgggccacacctggcttatctaaataagaagcagtgtagacaggaactggggtttgtgtgatcacagccacctgggcattctatcacatctgcccttatattcagtatgttgtctaacaaaatcttctcactggagcaaactgaagcaaagattgattaatggtgttttctgtcttcaaagaggaaattttttttttggtgaaatacatattttattactttgaaaaatttaaattaaaaacaatcttattttacaaaccaatctcaattccctctccctcccatctttcaacccccacatcatctccccaatctgccctccccatccactcctcaggagggtgaggcctcccatgggggggatcatcaaagaggaatcttacaccattaatttactcatctagactttatattccttcagtctatacattgttcactcttccagaatgaagtttttataaacccatcataaatttttcctcttatccaatattaaaagctaaaaacagtttcttattaatactcttacaggcaccttgttctttatttcttgagacaggatatcacttcatagctttggctagaacctactatgtagaccagggtgtacttgaactcacagagatgcacctggtctgccacctgagtgctgggattaaggttatgtgacactcaccttgttttgcaacgtatttcaacaggtatagccgggaataaagcagtaatatgaaattactcattttactgatgggagaagtaagcctgtgaatgtgacatttcctcaaagtcactgaggaaagtctgaaatttagctgtcccagaatgccaagtatcttttgttcaaaatctcccgagtaaaattctctccaattttgattgactgagcatatgctctgttacacaattcctgtagagtattctttaagaactcttgttaaggttgtcacaacctccatgaaaaaagaaaataactgcacacagttgcctatgtatatcaattttaagtgacagatgtgggggtgggtacaaaaatgtgcatattttgttataggtttttttttgtttgtttgacagtgtctcactatatatttcacgttgccctagaactcactatacatttcaacttgacttctaactgaaaatccctctgcctctgcatcatgagtgagtgagggaggcagtgataggattgtaggaatgttttagcatgcatggaagaaagttttctatttttttatttatcttttcaatgtattttagttgcttttaacaaagtctctctatgtagcactcactgtcctggaactcaatatatagtaccaggctagcactgaactcatagtgatctgctctgagcttgaaagtttgcatttttaacaagttctgagttaagttcatgctgcctggataatcacaatgtaagacataagatgaaataccttaagtatttttatgatgtcctgacaggaaaggatgcttgggttgaaatcatggtttcaccaatcatagatttgtaattttagcacagtatcattcaagttaggcatagtaataaaaacctttacatcatgaaaactaaaaattaggaataaacaaatcaatagtaaatatttattcaatatataccaagcaaggtccaaagtatttgacatgcattagcttatttaattctcaacaaaaatctacaaaataatcatggccatttccaattttacagatgaaaataatgaggctctcagacatgaacaaagttacagagatagtgtccagattgctggatgttgagacgcaacttcccatatactctgtcccttctcagcaaactgacattgatgctacgcaagattcctacaatgggctgacctttgcctttgcagtgtgtcagtttctattctttatattccccctcccctcccccctctccccccccccccccgccgtggcaatgctcttctgctaaatatcagcattattttccttcttgtatccttgtgccccttagacagatgtttctgtcctgctccattctacacagaggcttatattaattataaactgtttggctgattgcttaggcttattactaactagctcttacaacttaaattaaccaaaattcttatctatgtttagccccatggcttggtaccttttcttgtttttgtttttttgtttgtttggttttttttttttttttttttttttttttttgtttttcgagacagggtttctctgtgtagctttggagcctatcctggcacttgctctggagaccaggctggccttgaactcacagggatccgcctgccactcctcctgagtgctgggattaaaggcgtgtgccatcaatatcaggcgttaccttttcctaataaggcattctcatcttgcttcctctgcatctgtctggcgactccttctctacctttcctcttcccagaattctcctagtctggtagccccgcctatacttcctgcctggctactggccagtcagcattttattaaggcgatatgcatgacaaatctttatggtgaacaagaacattatcccacatcatccccctagaatgttttaaaaaccatgctcaacaccagtttaagaacaattgctttaagtgatatgtaacagattggtgccttagggccatatcagcttggtggagggatttttttttttattatagtttggcagtccatataagcagacattgggatttctaaagtggatattaaggaccagtgtcttctggtagtggctggctttcaccttgttggtcacgaatccctaaagtttaggctgagttctcttctggcttgagctcagttctatgatctttgaaggcatttatggtgcatttcttataacctttagaagaagaaatcaagagtctactgtttggaacaaatgaaagtacaactatacctaactcaacttgcagagatcacatctctggacaatcaacatcatgaaaccctttcctctagacttcttagtaatttactgacacacacacacacacacacacacacacacacacacacacacacacacacacacatatatatatattatgaaagcaactttaggaattttagacctcttttagttttaaagagtaagtcacaggcctgttaagcctttaagctttgagctttaatgaagctttacttgaaaatacaaaaccttccttagaattaagcttgataaaactggcatggttctcatttgatgagaaagaatgtgaagaataaataaagagatacagccactctgcatttccaagcatgaatgcttaaagaacattttgccacattagatccattctcattaagcatgccaagagaagtagataaacagaaaagtggccattaatttcatgttgtcacccaccatttgcacaaatgtctcaatattgatgtgttataaaaaggaaaggctgtatgacctcagatatttgcataattatatgtcaatttttccaaatgttcattagcccgtatcatgtataggtattgccacctctacatattttttaataattcttgaaaataattagcatggattatttattatttttttggttataatgaatgtcatagttgaggaggtcctattccggaatacggcagggccccagctgagggacagaacatgacctacctggctttacagagctccgtagctgtaggctaatttctcaccatagcccaaagaatacttgcttgacactctgggatttgagaagccacagttttgtgatgaagcagtttaatattctcccattttgttgttgctttgaatcttacaaattgctcctgtggcaaggcttaccttatttctgtatcattcatatagtgctcatcaatggccctactttgtgaagtgttttacatacaaaggatgaagcagctggccctgagttcttttccataaggaaatcgatttgatatgaatgtattcagaaggaaactacaggctatggggtcaattaagaaggcgagtttcctagggcaaaacatgtagatctcaattgtataccacagaatcctcaatcctgagtgttggtgagaaatctcagagaatgtggagtagggatgagagcaggctgctgagggagaaaataaatatgattgctgagacatgaaagcatcctggctggtaaatattagaaaaaaaattgttagacacacaggggttgaacaggtaggacaagcatcacaggttttgtttttgttctgttttgcttgaaataggatcaattatggtttatcattatggtttcactgaggtgaattcctaaagcagagtttgagatcctgtttttcagtagggtggttcaggttcaggcagttctggtttctgccttagtggagggtgtagggtaccacacacactggcctgttgcttctccacagaactttgtgctttgggaacatgcctccactgtgaaggaggaggtcagtgatggaacaaaacaggctcacctgcccctttacacaacatgtcattttgacaaaaccatgtgaggaagttggtctgtccacttttctgaggacacagttgggatcatggcagtagcaaattctcaactaccacacagctggattcaagccagaatcagtcttggatgccttgttctgtaaattatgtgagactgacttccaaaaaatgagttatgacagaggaagatcaagagtactacttataatttcatttttatagaattaagatgaccattgttatataaaaatgttgaatctaagtagtagccatcccagtatgttggcaatgtgattacttagtacatttcaactactgagaaaagttcctagcatagatttttgcaatcagtgtctatattaatacacatatgtatgtggaaatttatctctccatatacaaaataaataaggacttttaaaaaataaggggaaagaattatttcctctagattaatctaatagtcatttcatgtttaaaatttactctgtgcatgtacagtaaataacagaatatttatgctgaagcccagaaggatgccaattaagcagcacagcttctgcaatgctataaatacagaaaatgtaaaattattcagcactttctaagaaattaaattctgttttctcagtttactggaagtagtccaatggataaatactgcattccttgtttgcaaaaatgtacttgaggtctggcctgttgcataaacaaagataaataaaaattgcttgggaggatgaatttgtttgttttatttttaaaaagaaattaaatacacaaataaacccaatacaaacagatccaagatttaaagcaataaggggaattattaaaagttaaggacttgagctgggcggtggtggcatgtgcctttaatcccagcactcgggaggcagaggcaggcggatcactgtgagtttgagatcagcctggtctacaagagctagttcaagactgcctacaaagccacagagaaaccctgtttcaaaaacaaaaaaaacaaaaatcaaaacaaaacaacacaaaacaaaacaaaatttgataaggacttgggcctgtgagatggatatttaaggggtgaaggatgaatgaagatgcttgttgccaaacccagtgacctgggttctatcaccaggatagagtctaatggaagaagcagagaactgactcctgcacgttgtcctctgaaatctacacatgtaccatgggttatgtggtcatgtgtgtgtgagcattcatgcacttgcacacacacacacacacacacacacacacacagagagagagagagagagagagagagagagagagagagagagagagaataaataagcaatgcaacaaaaacaaaaattcgagaactataatccagatatttaaaaattccttcaagtttgaatagttttattgtacataatatagtctgtatgctaataatattccttttgtcatgggcacagaaacctgggagagatagaagatttttggtactgtttcctcctttctccactccttctttctcagtttatatttgatattatctgtatgaaaatatgaaaaaacagtactgcactgtccccacaaattactggtaagcagtaaattcctattagaagggtttgttggcttgtcacttgagtcagttagtactaatttattctttatatttttctaggtaatagcttggttagcatgcaaataaatggctttgttgtgatattttttagacatatgtatcacatttgtcttattttctctccaaatgctctccctgtctgtcccatttatctttcatgacacacatatatacagatgtacacacacatgtacatatacatacacatatatacacatgcatgcacatatactcatatatacagttgcaatacacatatacacacatatatgcacaccatatacatacacacacataattagttgatcttgtctcccatccctttagatttctccctcttctctcatagatgctttttcccttcctgtgcatatagatgataacaaaatttatatataatatgtattatatcaaattttaatctagattctgcatctgcaagaaaacatgaagtgaaatatttgtctgagtctggcttacttcacttagcataatgatttccaggttaatccattttattgcaaatgttataatttcattcttcttcatagccgaataaaattccattgtgtgcttgtacagcattagctctagccatttatctttcagtagacatctagactgggggatatgttggctaatgtgagtagtgcagaaataagcatgcatctgtgtatttcactgccaggatacctagaagtgatatacctgacccatatggtagttccatttttgtttttctatggaatcttcatactaatttccacactgtctatacaagatcacatgtcctccaccaatgaataaaagtttctttctccccacatccatctgttattgtttgtgttcttcatgacaatatagccattctgactggggtaagacaggattacaaagtatgttttaatttttattcacggatggctaaagatattgaacaccttttcaagtatttgttgactatttgtctttctgcttttgaaaacttgcttttgaattcaccttccttcccatttattcccaaagcctactgaaaatgcttatcttggtctcacctggatcagttttttgtcttgctgccatgaaaacccgtcagtttggcctgaccagagttaacggaagccaagtgcaaaatgatagctagaggtgtggtgtggggaagacaggagtaatggactgaactgagtggcctgtagttggaactgaatgttggtagagcctgaagagcaatgagggcctaagccatcaagcctcccaggcacatggggacggatttagtgttcgtataaagagaagagtcagtgcttatgacagagaatcagggtatgagccatgctggaaagcatgcaaccatagatttagaggtatcaagaaaattaatagccggaaaagtgctgcagacaagaataaatccataatctttaagagcggacattataagcatgacagtggagtcatagatgatgttttgtgggcatctcaaatagcttttgagagaaagaaagagtgttttcctaaattattacttttctttttatttgtgcgtgtgtgtgtgtgtgtgtgtgtgtgtgtgtgtgtgtgtgtgtgtgtgtgtgttggagtggggaatgcatgtccatatgcacacaggtagaggtcacaaattgtggttgtatgtcttctgttgctttccattttattttattttacttttgaggtgagctctttcactgaacctggaaatgactgttttgctaggctggttggctggcaagaccttgttatcctccctgtctcccctacctagtgcttgggatagcgactgctgcaccaggatttttttggtgctcatatcatgtttatccagcaagcactttatgcaataaaccatttcccctatcctattttttcatatcatattttaatcattaaaattaattaaacatctatttcataaaattcctgaaattgtggcgggagagatggcttagtgcattagagcatctgttgctattgcagaggacccaaaatgaattctcagcatccatatgttgactcacaaccatctgtaattcctgttacgggggatctgatacccttctctggcctctgtgggcaccaagcacagggatagtgcatatacatacttgcaggcaaaacatatatacagaataaagttaatctgatttttttttctgaaactgaaaaagaaaaatcactgtgatgtcatattccagagacaactaatgtaaagatacttactgatatctgcagtgtttctctccttatatacaacatttacatacttatcttcatcttgcagatgtatttttaaatgttgatgcaaatttaacatcacacccttgtattaaattcttccaaactctctttggctgcctttgccatcatgatctacttttctgcctgatttggaagcacactgggttccttgacatcaggggatgaggtggatgactaatcagaacacggtagaaggacaggtacacagccttgatctgttcactcatgttcactcgatctgtccacactgttcacttgctgggcatgtggagcaaggactaatcagattattctcaaacaatgggaaacagtgtcgggggaaatgatggaagaaagtgagacttacttgagaaaacctgtggtttggtcataagcataatgtcatggggcttacatgttcataaggagggattatactggtcctctgtagttctgatgataaaaagataaaagttgaacatttctaattgggctaaaacttttgaaataatttattcttacaatccttatatactcatgtgaacattaaccagatcaaaatataggctgcctacgtctttggaaggcctgaagacctattcccagttaattctctctacaagggtagatattgttattctttattagaaataaagaagaagaagaggcacaggatgagacatgggactattagacatattaaccagtttattataggcccggcagagtagagagactaagaaagaagagaaacagtgttagtggctgactgccatcgctggtcgccagagagagagagagagagagagagagagagagagagagagagagagagagagagcacgcaagtgggagaagagaagagcagagaaggagagagtagagaggggagtagagagcgtgtaaatgggcaggggtctatcttttaaaggggtcctttgcacctatgtgcagacttagttcccgtggaaccctgggctgaccagggttctgcctgagcagattccaacaggtaacagaggcaggccagcataatgtctgaacctttcagtcattgttctgaattctactattggagattattattacctgtttcaagtcatattaatctaatagttaagtatgtaagtgcctagttgactttgctcaattttatatcttgagtttacccccttaatgagtatataaatagctcatattttattactttgttgcattccattaactaaatatgccagcttgtttcatccactttgccaccagcagacacttggattgtgtccagattgagtgttttccagtcttacaggtttttagaaaatgactggaaatgtcctttagcacatcttttggctagtttctgctttcatttcatttaaatctacacttcaaataaaaatgtctgggtcacagtggaggcatacatttaacttttgcagatatatcatattatacctcacaggggatgatccagtttatacaacaaccaaaatatgaaagagtcatgtttcaaattctcaccaatattgttagtgccagcattatcaagcttatctggctgaaacattttaatagaacagaatacacagcctgaaagtcactttgtgtatgtaacttgtaataatgagttcttgagcatacagctcaaaatatttatatttcccttaaaagtaataattttcctaattaatggattcataaaataagttttctttaaaatgataagacattaagtagattgacagcctagaagaaaccacacacatttatcatcttctacaaagaagccaaatgacacgaggtataaaggagattatctacaataaatggtttttgaggaacttaatattcacatgcataagaaagaaactggaccatcattataatacttaatacaaattacactaaacatgaattaaagacgtgaatgcaaaacctgaaagctgtaaaacttctaggcaaaagcacaagggaaaacctttttgatattggcatgcacagataattgttttctaagaaggaacttcaaatgttggcaagatcagacagatgggagtaaaccacactcaaaagacactgcacatcaaggaatcagtagagtgaagggacagcctccttaatgggagaaagaatctagaaaccaacatctgctaaggggccaacatacacagtgcttaagaaataacaacaattaaataattagaaaacaaataacttcattaaaaaaaaaaaacggagaaaggacctgaatagatatttttcaagagaagtcagaaagacagaatataatcatatgggggaaatctatcaaatttacagattgttttgcaccagtttattcaagggcatcttgtcctaatgagatacacatattgcaggagtcatgatgaaatcataacttccatttttggatgggaatgttggatatgactagtaattaaccttggtctaggtttgagtgtagcacacttctaggagggagctatctaggtgccattcctctgttgccgcctctttcattttcctttgtgttgtgccttacactgacgccccctttgcaacaggaaactacacagcccatctgtgtgcctgcagagcagatcttttgtgtgtgtttattttgcttgccattttccccctgccggtagtttttaaagaataatattagtatctggagatgcactgatgtgctttaaggagaagccccagagttcgaattattttcataataattccaaggtccaattttcttattaaatgcccaccctctcacagaattctagtacagtgtctcagtgactaagacagctaccagaagctcttgcttacataattttgcatttacactttctcagttttactctctattatggtgattgtgaatagctaaattccataaaaacaaaatttctctgagatactcaatagtttttcaaaatataaaaggttctttggaataaaacgtatgtgaaacaaactttgaaattaaaatgagatgaagtgaggacaaataaacaaattagaatttcatagcaaaatgtttttatttgctatatcaatatttgaaagcagataatcttcactgaaggagaatgggtaagactgagactttgtgagaacataaaaggcccccttttgtgatgaacaacatgatgaaagcatccaaaagctaaacattcctacaagatttcccaggtttatgctttgtgctagagttcccagaaaaatgagctggactgatggctttattgttgcttttgtttttcatgcgctgttgggatcacctctttcaattaaaatgtagaaacttttgaaaagcttatatgaattttcttgtgggaaagagccatacttctagggacagagctaggcattcttcaagtaacctatgatgttcattgcctctgtgcaaaggtggcaataatgacattgctttcagatagaacatgacggagaacctgaactaacagcaaatttcaaactcagcagcagattttaacgtgagccacaaggctttcagatcttgtcaggagaaggtcatctctgctaacctgatattgagaatataaaatgtgagctgtacctttcttcttagcatcctcaactcttggtactctgacacacttgtgaattctctgtatctagaaatatttgaaagttttccaaaacattttgatgtctgagacaggtgaaggcccagcattcgttacctatttctttagcttctctgaattctgtgttactatagaaacaaagaaaatgcttaaaatgcccggagcatgtcagcattccacagaggtagccctctctttgtataaaaattgtctgcacatacattcttgtttataatacccttaattttaatctatgtgacaaattccctctaggacacagtgctgggacagcatttgtcatcttcttggacaaacatgggtacattaaatcaggcattaagaatcacaaattctaggactggcatatgtgatcattgttcattatctgaattcctcttccaaaagcttctagaaccttcccacatagtgccacacattgggaaaccatgattttaatacagaaatctttgggggttactgtatattaaaactattctttgtctctcaaaacctgaaagaacatggtggcagacagaaaggagccgcaatcggaagtggtggtcacaggccatgtctttagtctcatattgcatctgatctgtccatagtgttaaaatactttagaaagttaggaactaaatttaatacttaagaaactacataaaattgaaatttcttgctatttcaaagagccagcagttctgggtttctacttctgagccatccgatgtcctctttgtgcttgacctcacatcctcacaccactttgttacctctgcaaaggttaatttgattctcaacttgatgggatttaaaatcaccatggaaacaaacctctgggtagttggagatggatctgctagattaggttgaggtgggaagacctcattccaagtgttagcagcaccattctgtaaaaatgtgcacatgtggggaccccaggcagactgaaaggagagggggctatgtaccagcatccagctgcctccgctccctgactgcagacacagtgtaaccagccacctcacagtcctgctggcctgacttctccaccacgatggtggagggcatccttcaacaaggtgcaaaagtaatcccttctttcctctaacaaacaaacagcatgcacctccgtggtgagtgtggtggcccacactttttatcccagcacttgggaggcagaagcattcaaattttcatgagttggagagcagcctgaactgcaaagtggggtgcaggccattcagaactacacatgaggccacatttcaaaattaaactaaaataaaaccacactcccagtgttgccttagttgaaagaaattcagtcttaactttaatgtatgttttcatctgagattttaatttggacaatttttattttcttggattttatttatgttttgatgctgtaagttgttccttcacttttatggatatagccatgcagaaaccaaataaatgaatgttcatattagtggatttacacctacaccactgtgaaaattaaggtgttcaattgtggtgtttatcatttgagtagcagttatattttggataaagagttcttgtcagactccaaaagttaacagttctttgctttatatttctttttcaactcataagagagtgctgtttcctgtgatttataagaacaggtcacaatgacccaagtgtcagtctcacgaatgctgaaattgattgtgtgttgaacccatgcactcattttctgcaggccgtaaaatccaatggcatgaatggatgcaaagcaatgaaacaattggggatttggggagtgtctgaacctttcatgattcttctcatcttcagactggagcaaggaaactctttccgtttgtttctttcatttgataccaaaggagtaagacaagagaaaaaaccccagcataaggatggaaaagcagtaaatcatgactggtgtttctgctgaacattaaagacagattgtaagactgattttcacccaggcaggagcttaagaggcagagaagcttactcagcaagaacacagatatgagaaactgagtagctcatttgttttgttgttgtttttgagactgggtattatgaagcccaggttgtctttatagtagctctgtatgtaaaactgacccaagctcctatgcctcctgcctttacttacaagagctgggggttaaagatatgtactacctggacttaattgttgatcttaacaagttaattgtttcttcccacccagttcccatgcctgccatgctatggaaattctagagagagatagagtaatttgcacttaatttggtggttggtagagatattgaaggcccttgagcaggtgtcggagattctaactgtgcattcctagtctaacaagaatgtataaggattggaacgtggaggaaccgaagcaaccacagtggagggccagtcctcagatttcactcccatcgttggaatctcaagaatgaagtcttaggatgggccttcatttgtggttgctcaggagctggtgatacgggagagtaaggatgagaaatcagagatattttcaggtgaattctatacatagaaggcaatgaatttcgacaactcagtggtatgtttctagaacagcattttaagaagccatcgtgaattctgtcttattatttttggggggtttactgagctggtagaaagagaaaaatcagcagtcagtgtaaaacaggcagtggtgatttattttaaaactgttgataatgtggattatatagaattacctgaggaaactggttatttggtacatgaagggctaaacaacaagagaaactctgcctcaaaactggatggaagacaaatccaaatacctgaggttatccttggacctccacatgcaaactattgcacatatgaccggcaaaacacacacatacacacacacacacacatacacacacacacacacacacacacacacacacacacacacacacacacacacacacacgaactcatcaacaaataaaagcagctgaaactgagtgtcattaagtttcataccagctgtatgccctatcaaacctttcctatccgaagcatttaaccattcccattggttaaatggggcctgttcacagagaaatgagcacataggaaggtgtctctctgtgtatcttcacctgtgaactatcaaagcagaaggagaacttggattgtttggaaagcaatttataaaattgctcagtaaaatatagtagtgggtcaagatgtgaagggatttcacatcttgtttaaaagatgtgtttttaaaatgaactttattttaactgatacataatgatgtaacatcgctcacctcaatggataccacgtgagatgtatgtatgtgtgagggttttgagccaccatttttcagacatcagaattttcttggtcatcagcaatgcaatgcttctttaatctatcaataaatgctgcctctaagttttgtctccggctatacatggacgtgtatagcttatttatgtttcatagttcccctgtactttaagtgtggtctccgcagtgcagacttctattgaactgttttcaaagtgttctctaaaagctgtttataaaatcattgaacctcaattgtgagatcatgctcctaggaataactactaattctgtgttaaagtgttccgttcatttttttttcctttatcaattccattagctaacctctattgcacccagaatcgttattgatcgaggtttttttttttttttctttatcagactaatgtatgttttcccaacagaatactgtttttcaaataaacatcacagatggaatgtagccaagacttacagggaaactgaatcttctgtttgaaggaatatttaaaagaaataagggccttatttttgtttatacatgtattctgttgaaacaagtgtctcttataatttatctgaataattgggcatgcaatcctaagacatatcaactgatatgtatttactcttttatgataaaagaatcttcatgtgatactgacaaaaaatacagagaatacaggaaaacataaagaataaaactagaatagaacttactttacctggaactttactaatacctagaaaaaaaaccactgataacattttgacttgttttaacttgtacctcctccatcctgcaagacaacataactaaactaaggtaggattatgtacatataagaagaaaagaaaaaaaaaacagaagacaaaaccagcataagtctaaaacaaccctggaatttgaaaggcaacccagagctgttatgaggcttcctagtttcccagaactaatatactcctgacatatttgctgatatgtcatccttagagccccctaaaagcttcaagagcctcatcattataggtataagcctagctttctatttatctcagcatcctaactcccaggatagagaaagataactgaatgggcccaccttcttctcttaaaagaggtttccctgggaaattctatttctctctctctctctcctcttttgtattgattctttgggaatttcacatcatgcacccatatttcatgcatctcacagtccctcttgtagtatctcccacaaaatgaaagctaaaaagaataaaaataaataacaattaaaataaaaacacttcactcctccgtctttcccattgctttgtcattcattttagtggcattaggagctgctgtgtatcatgtatcatcacttttgttccaacttgccaatgttcattgtgtagtgagttgtccctatatacatctccttgcttatcagatacttacatagctgatagccaagttcagatttggagacataggtgaatttcagaaccaattagatgaaaacattcaatttttatcaacaggaattattactagatggtggctggtaggtgacttggacttgtgtttaggtatgtttgtctgtctctgtgtatatacaatatgaagccttttctctaagctcacatttccaaataggaaatagtcagtttctgtgagacaactgattttttaaaggcattttaaaatgtttgaaaacaattacctatttattttaaaacttgtggaaaatagtaccaatgtttcacttgaaaaatataaaccaatgtgcttctgaggaggctgagaaattttcccatgctgcaagattcgtgtgtgatggaaactgtgatgagtttgaaaaatcttgtcttaaatcagtgttcattgcagaaagccacagtctagccttggaggagaaccaatgaagtgcttccatgtgctgggtaaatgcaacttccacttaaggtgcccagtttacttaatcacaattaaacaaactgtcagcaaatgtttttggtacgggggagtaaatacactagaatttgtaggttaaaatggacaatgaagacatttataaaatacccccaaagaaaacttacgtaactcaaaagaagacaaatgtactttcttttaaaccgttaaacaagtacaagccattattagcccaaggcattccacagtcatgtgacaagctccacttggctgacttctgctggaaagaatcctcaacaaaacactttccacttggccgtgagatgacacaacacagccttatgaagaaatcgggagcctgaagagagggctcagaagttaagagcactggcccttccacaggaccctggttcaattcccagcaccccatggctgctaacaactatctgtaactccagctctgggagatcagatgctctcttctggcttcctcgggcatgtgcatatatgcagtgtgtagttatacatgcagggaaaatacccatgcatataaatacaaataaattttaaaattaaattggggtttctagtaggaaacaacacatgaaggaaaatatttctctaggtcctaccagagtcaagtgggtcaaaatttggccttttcctgtcatttcatgtcatgtcctgtgagtgagttgaaggttcatttaagaaacaatgaacaagctcttgaaagagtgagactgtctgtctggttgcaggatttatttcatttcaagcaaaactggttgataaacccttttcacaatagacaatttgaaatctttgtgttcaaagggaaaattaggaaagatagtgttttcaagttcacttgaaaatagacatcttaggaagttagaatctccatttctagtctcctctccatttaaatgataatgcagttaatgctttaaataaggactgagaaatttggatggccatcaaaaggacaagtgttgcaggaagtatgttatcatgagtagcagcacccctgcaggagggacctgacctgctgaatcccagatgcaaaaatgagaaatggatttcagctggagctgacaagtaggagcctttgtagaaggcgaacatggaaagtggggttgctgagtttactgtttcttattgaccaggggtttgagcacacattagttatacttccactctgtgttcttgtagcttgtcaagcttattgcataactggatgtgaaattctaacttttgaagcaaccacaataggcacgcatgtgccacctttataggtgaaaataaccaggtcttggtgatatcaaacattttgcaagctcacagagttataaggttgtattccaaccagatcattaacttaaagcatgtgaccatcccactatgccatattgctgtatctaagactctatcaaaattttatgctgagcctttctttgactgcttgagcataattttctcactgagatagatgtatcatttctggctgggctagaagctgttacaggcattacaattttcttcccaaaattccttgaatagtttaataaatgatatatactttttaatctgaaggtcatgtggtaagttaccagaacgtaagtgagaaaataagatgtttttcatcctttgctattgaagcatcgtgccaaaatctatagaaagggaagaaggctgttgagttctcagtcaactgtactcaaatatgaaagttgtttggaggtggaggcaagagggtcaggggtataacatcattctcagctatagagagacactgaggccagcctgggcttcgtgagatcttgtctcaaaaatagcctcatcttcaacaacaaaagcaaaattccaatccaaacaaaatgaggcctgaatgtaaaaattgtcaaagtaaaatatattgaaataatttgctgtggtggcacaacttgctttgagatgaacgtttatagatttttaaaacgtgttccttgtaaaatatttaaaataaagtcaagacttcagaataatagagtttagggaattagataggaagctttatttggcatcaaggaataggtggaaatatgaacagcattttattagcgcaaggcattttatggtctgaaaatgtttacctttatactctcagctgttgctgtttgctgccacagacgttttaattcctgccataaacctcatctgctcttgttctctgcggctttggcatgcccttcctgttgcctgatacaatcttattccctcttagctatctaagaccccttcctggctctttaccttccccaggaatactgtatggctaaagcagagcctgctcttcatgattccataacctaccacagatgtgtctttttagtaagatttaccacactggcctggtgtttctctgataatcccattaaaggatgatatttttgagagcaggaaagatgtgttttgtctccatagtctctgcctggtgcctagaactccttagcaaatacagattagataatttactgtattaagatttacttggtttgtgaacgatgtatgtaaatttctaattcacctaggcttttgctgttagataagcatttaaaaggcacactgtccagtgtgggagaatgtgttgctctagttccttaggcttgcttcacttgacaccatagctgcctcttggaatgtctgaaaatcaagtgctctttatgtaaattttctctttgtgtttgatatcagcagggttcatgagagcaactgtaaatatttgccattcattagctaacagctattggaaagcaatggaatatgtagctgatagttaagtttcggcaggggggggatcaaagagtacagaataattttaatgatactgtatcttttactttttaaaaaattagcccaaaagtttgtagtgagattttttgtttcattttatgcagtactaaaatgaaggtaaaagaatccaaatatttaatcatgacctccttatcccacattttttgctattaggcagacaattttctcaaagaatgtatcactcaagagtcagcagatctgatgcacaagtcttcagagggagattttccctctgagccttagaaatagcttcatcttcaaggcatccttcacagggacctagctgcttccccatgtcttagagttctccagccttgttctgtcttaaggagcaaaagaagagatgtaatgagtatcttttcagcttttcaaattggaaaaccacaaaagtcaaaactgctataattagacaatttctagattaataacagtcttccacagcatgaatggactaagccggaaaaatgtgagaagcaagaagctaatgtttggggactgttttcaccactgccccgaggaagtcttcacttccttttttcatcttttgtttttcattaggtacccaagtagatatttcaggattgtaatcatgcttgaagtaaagatggaatacacccagttggtctattaaacacacaaccattgccaactttcccagtccatttctgtactcaattttctgttgtgtagatctcactttcacatgcaaagttttgtaattcagtacaaataaacacatctactcattcttctcatgcccacttccaccatgtttggtggaaacatttgattcagtgatttgtgtggggaacaatccctgtgtctgtttctagaatcagaaggtatcagaaaaggcaatggcatggttagcagaaaattatgattcactgattttatgaagagacagtgtttctgaaaaccactcatcttctgagaagtgcatgcaactgtgggacaatatactaatagccaggcagattgctgtggtgttcagagctgtggttttgatgtggttgtctatgcttcttggaagtcggttgtttagcaaccaacacctttaagggaagagttgctgacatcctgcatcaagtggaagcctgccttcctttggagctcctgtcaccaacatcaggaatctttgacagtagtttcttactgacccatgcccatgacagccatcctgataaaagtagggtgtcttagtttgggcttttattgttgtgaagagacaccatgaccatggcaactcttataaaggaaaacatttaattgaggagtcttacttagagtttcagaaattcagttcattatcatcatgacggggagcatagtggcatgcaggcagatgtggtgctgagctgagagtcctacatctggactcagaggcaataggaagtcaactgactcatgactcaccgggttgttatctgagcttcaaagccctctctctccccacagtgacacactttctgctacaaagccacacctccaaatagtgccacttcctttgggggccattttctttcaaatgaccatattccattccctggcctccatagggctatagccatatcatattcaaaaatacattcagtacaacttcaaaagtccccatagtctgtaacagtctcaaacttatttcaaagtgcaaagtctctacggaattgccctggttgagtccagttcatattagccaatggaaatttctttctattgtttttctcgggagcaactcagtctagagtatagttaagagatgatgcaacacaggtttattttgcaatccctcagagtgtcactttacctggtagagtccagcaagtgccagagctgtgtcctcccaggcatttcaaatcgagttttaatttagatcagcagttcaggaacaaatgatttgccaaatgcaggtggcagaccatcacttctctccccaatgtccatctgcagaatactccaagactttgctaaaatgataaattgatgtgtctggtgggaaacagcttgtcaccaagaacagtcgtccacacaaatgggaagcagcacgctacaacagagaccgcaggtggtacttacaacaaggcatctgtgatctcagggctttggaagctgtttagctatttgattttgctttctgttttgttctgttttttttttctttctcccattagaccaagagatttcttgttaagctaatgtctcatttcctaaaagacacactgtatcattataggtaaaatatgtatactttaaatatggccaagaattcttttaattctgatacatcttaaaatcatgaatcagctaataactctatgagtcctgcagttctgcaggaggtttggagcatagcttttttgcaatgtcttctgtgtgttcattgaagctgcattttataacagaagggagcataacacatagcctataacactgattaggaagcaaatatcaaactttagtcaataggcagtatagttaaaatgcaaactctttttgggtaaggaataacaaattctaaatcccccaatttccaagcagagcagagctggagagatctgagcccaccccatcatctccagattgccaacggactaatggtttagtcaaattataatgccacacctatgcaaagcccccaagtggcaaagagcttacctgttctcaaagatgattgcagcagtttgacaatgtcttcttgtctgtttacagtttaattcctgcagtgagtgagtttctctgtgttatttgaaagtgactaccatgcgattcagtttatatctaaggaacactgattattaactctaccacaagacaagcactgagaccaggttccaggactatatggagaaactagaaagcataatcattactcccccagcaccaagagttcataatcaacaatcaacaggaaaggaaaaccaagaaattacagtataatgtgccaaatgtcatgttgagaaacttgtaacatgtctagaaagtttattatacagatttgtggggcatgcgcagttttgaggaggatgaaacatttaaggtcagttcaggggatgcactatgaattcaaaatgttaaaatcatgtaagattaaaaaagatttatttatgttcatttaatgtgtctgagtactctgcctgcttgtatgtctatgcaccatgtgtatagctggggtctgtgaaggtcagaagagagcaatgtatcccctaaaactagaattacaggtggttatgaaccaccatgtgggtgctgggaactcgacccaggtcctctgtgaaagcagcaagtgctctaacagatgagccatttgatatctgaagggagatatttttctggatggttgaatttattcaaacaacaataaaatataaaatatagttttcacattttgaaatctcatgtgttctctttataactttattatgagcacttcaagagaccttgttcagagtcccagttaacacagattggacatggatcagctggaccctctctttatgtaagccattcccaactgatcatctgttactggatttgcaaatagtgttccacttaatccttgcaacagtgttctggcttagatcctgcagtcagcattgcttattgtagtatttcaggctctatcagttacaatgaagatgttagtctgaaattactaaggtagaactgtgtggcttatgctctctgaaggtcaagctcccagctgatgactgaagactatgaggacacatcttctaggatattatctgacttacacaaacttagcccaatgaaagtcaactatttgttgtacaaaaagacaactgcaggcagaatgcactttctttcctatgttttcagctacttccttatagcttttgtgtatggtgcttgcagtcttggtcagaactagcaaacatgtttcacggcactggggtatggtgatttttatgatttcttaaagcttgtctaaggatccagaaaacaaagtcagctacaaaccaaataagccagacacacacctctaatctcaacagccagaatttaggaggtggtggtacacacctttaatcctaggactcaggattaagaggtagatgggactctctgagttcaaggccacccagggatacactagattgaatcagtctagaagagtaacacatgacatgcctttaatctcagcactagaggggtataaagatagaagcagggtcatcagtattcagttggaggcattcattctccaaccacattgagaacaggagcaccacagaccttttagatgtaagagctctctggtagcttggccgctttgctattctagtcatcagcttgaaatttgaaccccaatatcagtctctgggtcttttatttttagtgctacactgggatttttggtttgctactcataggaaaccaagttttgtgctataaattgagtgcttaaatgctgatttagggatgactgctagaattttatgttggagtatgagtttatggacatgtagttgtgtccatgtgcatgcatttgtgtgcatgtgtatattgtgagtatatagcatacatgggaagctccacaaaggattacttttatggcatatacatgaatgccatatgctatatattgtaatttttttaaaaagcatcatataaaattatataatggctttaaagatatattgctggcatttgagaatttttttcacttagtactctataaaatatggaacaattttatattttcaattaaaattagaatgttcatagaattttatttaaagctttggtgaacgttcagatcaaatcatcactatgaataaaattctagtatagatcatcagtaagttctatagacataaaaatatttatgatattactgatgacatatttatgaacttactgatgatctatgtataattttaacttttggaaaattaatgactttaaaagaattattagttctttaagaatttcatacaacgtgctttggccatatcccctgccgtctccaccaacacttcccagatacacatcatttttgtatctaacttattttaaatccttaaagaccagtttgtgctgaccaaatattcttggagatgtggtcttccattggagtacagtcgatttatcaagagttacacttagagaaaactatctctctttctcccagaagctaacaactgtcaatagctctatggtaatcagtgtgactgtgtgtctaactctcctctctaggttgagattgggtctcatgagggtttatacaggtttttcaaatactgttgtgaacactgagttcatatgtgcagctgccttgctgtgtccagaagacaacaatgtccttgtcattcactgcttctgtctcatattcttttggtcctctcttccacaatgatccttgagccttgcatgggggtggggcatcagtatatttgttccctttaggaatgccattcttcaaatctcttactctctatacatcggctggttataggtgtccatgttcatcaccatctacaagcaaaagtgtttcagatgagagttaaggcatgtataatggtaaatcatcaggagtctgttttacactatgatgttttagcagaataaagtgccaagttctcccctaggaattatataaactgtccagtcctaggttcttggcttgatactggtgccaggtatgagtttcatctggaggaggagaatttaatctaatcagaaagtgtttgactcctaatttagtttaaatattgatttttctaaaaatgcttactttttggttttatgaaacaaattattattctgtacctatgttgtgttaacattaattatatacctcaggcttgccttgaactcacagtagttctcttgcctcagctttccaagtgctggggttttatgcacggtatcagcatatcttgcagaactctttttctatgtatcaaaaagtttaacttcttatgtttctcaaagcaaacaaaaacttaatttgtgtgtgtgtgagcatattgagggtcaggatggtcagtccatttgtgtcagcatttactaagtaagacagcagtgattttgtttccatagtgactgtttaggatctagtttaataattgtaggtaggcagcttaatgtcacttatttaaataagcaaaaagaatgggccaaatattaactaacagcagtcatgtctctaacacagtgttcaacttgcgtgtcatcattctgtctctgccacacaaatgtaaggcactaccttggccattgagagacttgaatgaatagtgttacctggcatcaaataggagattccaatccaaattctttactccatgactcactttgtatttttgacccaacttgcattttgaatgtacaagttccttatttttgcagatttttatagaaaattattaaataggtgacaaaattatagagtgcttgtcaaatgtgtccatgaacaccaagtttatgttttgcattttgtgctgttttgcttaaaatgaagtttattgctttacttgtgaaaaatgagcaagtaaggattaaaagagaggactagagaacaatttgtaggagacaatgatgtttattctgcctaaggttagttatttatattactatgttcacactgttcccttccactaaacaagtcaatttaagtggtttttaaaacatttatcatttcagaaatagcttttgtttcattattattcactacttttcgcaatgttcctttgctgaaaataaaaaaaaaaaaaacattaagagtggtttatttcaagattgttcagcagtgttgacggtgtgatgagtcatcactgaataactgatttgagggagtaaggaaggacttacaagacccacccagtgactgcaagtcagtctcattatagaaatgtcacaatgtgagtgaagttttcatctcagagaagaaaattttggaaactgagaatgaaaattacaatagtaagtgagaggtttgagcaagtaagtagaagattaaaatgtaatatagagtcctgtaacagttactattattagagtttggtcttgatggtaaagtatatagcttaaaaatacttcatagatcttatatacctattacttactttaataggttttatttacaactacacattagctgaatcaaatctgttatttgttctatataacatgtgtattcaaacttgattatactcataaaaatgtttgtcatgaactttatttcttgtgtctttctccagatgttgtatttccaggtgttattctccccccaaggctgtccttaagtaccatcttcagtcaagatacctttcctgattgctctgttcagaagtccctcaggatttaattgtcattatacacagtgctttggactattggttttccttgtaaaaaacaactgtggtttggaatcttgatataaaagctgtctagtttgtacagttttggaaagtccttaaattattcccttgcgcttaaaatgaagaaatcaatcagtgaactcattacaaaattgttataaaagtgaagagaacttggtctataaagcagtgaccgatgagtatatcatcattaatgtgacacttaccattaccaggccttttcacttgttgcttgttactttctgaggacatgaaataatccttgacattcaatctcattcattataaaagatattgtctacttacatccatggattgccgtttcttatatgaaatcatcatacacagtatttttttcaaaaaacatttttaaacttaaattaaaaatcttattttacataccaatccaagttccctctccctcctgtcatcccactccccccccaccatgtccccatcccaccacccatccactcctcagagagagtgattcctcccatggggatcatcaatatctgtcccatcgtttggggcaggactgaggccctcccccatgtatctaggctgagagagtatccctctgtagggaatgggttcccattcatataaatactgactccactgccagtggccccatagactgcccaagcccctccccaactacaccaatgttcagggggcctggtttggtcctatgttggctccccatctgtcagtctatagtcactgagctcccacttgctcaggtcagctgtttctgtgggttttcccagcatagtcttgacccatttctcatcactcctccttctctacaattggctcagtacttaggtatgaatctctgcttctgcttccatcagctactataaaggctctatgatggcatttaagatagtcatcaatctcgttatagtgaagggcatttaaggtaggttctgcactattgtgtagattcttagttgaggtcatccttgtggattcctgggaatttccctaatgttaggtttcttgttaagcccataattgcttcctcttatcaaggtatctttttctttgctctccttctctgttcttcccccaattcgactttcctgatccttcatagtcccctcctcttcccattttccttccttctttctcctactcctctcccaattcccccacgctcccaatttactcaggagatcttgtccctttcccattcaattccactcttaggtatatacccaaaggatgcacattcataccacaaggacatctgtttaactgtgttcatagcaacattatttgtaatagccagaacctggaggcaacctagatgcccctccttcaaccaaagaatgggtaaagaaaatgtggtatatttacacaatggggtactactcagcagtaaaaagcaatggcatctggaaattcacagacaaatagatggaacaagaagaaaccatcctgagtgaggtaacccaggcatcgaaaaacaaacatgatatgtacttactcataagtgaacattagacatagagtaaaggataacaagcctaaaatccacaaccccagagaagctaggaaacaaggaggaccttaagagagacacacatggatcttacagtagtgtttttataatgcctttgctgttagttaaggagcacttcacagttaattatctattctctactgttacttgttcaggttgtatcctccacaattctctttatggaaaatgactaatgtacatcacttgagtcatacagttcttcttttgggccagatgtttctttaaaaagttcttcaaagtgtggaagtgcaggttcaccttttgtgtttctgtctgactttctgcaaatgcaaagttatatattagtcttatcccaagatcagatctcctaagatgggcatccagatatccccatatcttctaaaccaagtagagttttggaattatgtcaacaggtacatgttacctcaggttattccatattaataatctacaaagatagtcactcttgctcatgtgagttatgatcctcagtcctcccaaccacaaattggtacttgatgagcaaaatggagacagaaggttgcttttgtagtttctttgtttggagaaacattttgcagtgggtgtcactatgtagtcagactagtctctaactttccaaccatttcctcagtctcttgagagctaagaatgcaaagcatgttcttatcctaaaggaatggctaaatgctgtgaggttttgcaatataaatttatgttggcaaaactgtcctagtaaattgcctacaatcttctccataagaaaggagaaggaggaggaggaaaaggaggaggaggaggaggagaaagaggaggagaaggaggaggaggaggaggaggaggaggaggaggaggaggaggagaggcattgacagggttctgtgggcatctctaatggaacagtttccttagagtttcagttcttcggagtgatcagaggcttcgaattgtcccccctgctactgcattaacttatatcaattgtaacataggccttgtgtttgccacatgataaattattctcagtaccctgttactgttaggaaatagctacattcatgccatacttagcaaagatatctatctccttctactggacttagatcttttatagttttatatgttgctttttaaatgaagagagtagaattaaacatcaatagattgcaaattttacatcaggaggattaaaacaaatgttgcttattattagtatattcattttaaaagtagaaaattatttcatgagaatacgtgcattcttttttaaaaaataaattctttttagtcagtagtgcaatgccctctaattatttgccctggagacatgagtttgtgaagtgtttccaaaaacaagttattcaaattctgaatatactcatttctctgtgttgatttggatatattacataatacattgcctgccttctttctctttaaagtgaaataatgggcccaataagatggctcagagggtaagatgctttgctgccaagtctgacaatttgagttctagccctagcatccacttggtgggagccatcacatgacatgagatgttgcactgacatgcttacctttagaattgagttctattgctgagctgctttctagactttctttaggctattttaatattaaactattacaaattaatttttccttttgttgatgacttacagggcaaagtgtaggtcctggtggaggctgacttgcattacttttcctgacagctgtttcttggcaccactgaaagctgccctggatccttgttctctgtcagcactcaatccccaccggcattgtctctaaattgcttgcaggtattttcgtgatgccagctcaaatggaagaatccttaagtagtgttgttgcgcagcactagccacattgaaagtcattgcatttgatctcccagagggaatacttgcaggaattagtttgcagttgagttacctcaagttggaaaagacagagtaaaacaagtattgcttccagaatcagcagtgtgaatcgtctgattttagaaaccttgcgtcttagttaggggttctatgactgtgataaaacaccatgaccaaaagcaccttggagaagaaaatgattactttagcttattactcccataccacagtccccattaaaggaatccaaatgcaggagctcaagacaggaactgaagcagaggccatggaagagtgctgcttactggcttactccccagttcttgatcagtttaatttttacagcacccaccagcagagaggtggcacttcccacagtgaatgtgacccttccacttcaatcaccaatcaacaaaattctgcacagcctcacccacaggctgttctggtaggcacattttctcagttgagctctgtctctccaggatgactccagctgtatcaagctgacataaaattagccagcatgacttgtttgttttttgaaagcataaaagttaaagcagaggatatggtggagaaaaataggtgggttagtcccaagtacttcatactaacagatgcccagctgcggactaaaagcatttgatagcattgtgttagctcaaatttcagtattcaaacagagaacagatggtgggtagccatgaccttactccgacctcagacccctgaaccagaagggaaattcaagtttctcaacagtgaaatgtattatgcttcatcccatacctagaagcataaataaggatatcccatatttatttatttttatttttttaaatttatttattagttccagttagggaacatgcttgtttcacatgtaagtcccttctccctctccctcccctcaccccatccctcctcccccacccccagcccatcccccactccatccacccaccactccccaggcagggtagggccctcaatgggggctctgcaaaatccaccaaatcttcctgtgatgtcctggggcccttccccatgtgtccagggccagagtgtaacccttcacgtgggattggctctaaaagccccttcttgcaccagggaaaaatactaatccaccaccagaggctccctggagtgcagaggcctccttattgacatccatgttcagggatctggatcagtcttgtactggcctccccgacagcatctggggtcgatgtgctctcccttgttcaggccaactgttcatgtgggtttctctaagctggtgcagaccccttcactcttcattcctccctctcttcaactaaattgccaatttcagctcagtgtatatctgtggatgtctgtctctgcttccagcagccactggatgagggctcttaggatggcatgaagagaagtcatcaatctcattttaggggaagggcttttaggttattctctccaccattgcctggattgtcagatcgtgtcatccttgtaggtctctggagatctccctgattccagatctcttcttgacctatagtggctccctctgatatggtgtctctcatcctgctctctctcctctattcttccccaactaaatatttctgcccctccatttcctctcctctactcctcttctcttgctcttattgtagcagctccctcccccctaccctcatggtccaaattagttcaggagttcatgccacttccattcctggggaccatttatcccttagagtccttcatgtttcctagtttctttggtgaagaggattataggctggtaagcctttgctctatgtctaaaattcatatatgagtgagtaaataccacgtttgtctttttgtgactgggttacctcactcaggatggtttcttctagttccatccatttgcctgcaaatttcaagattccattgcttttttctgctgagtagtactccattgtataaatgtaccacattttctctttccattcttcagttgaggggcatctaggttgcttccaggttctggctattacaaacaatgctgctatgaacatggttgaacatatgtccttgttgtatgaacatgcagtatttggatatatacccaagagaggaatggctggatcttgaggtagactgattcccattttttctgagcaaccgccatactgatttccagagtggtcttacaagttcgcactcacaccagcaatggaggagtgttccttttcctccacattctctccagcatagattgtcattggtatttttgattttagccattctgacaggtgtgaggtggaatctcagagttgttttgagtttcatttctctgatggccaatgattttgagcactttcttaagtgtctttcagccatttcagattcctctgttgagaattctctatttagttctgcaccccactttttaatttcattgtttggtggctagcttcttgagctccttatatattttggaaatcagtcctctgtcaaatgtgagatcgatgaagatattttcccattctgtgggtggtcgttttgtcctactgactgtttcctttgccttgcagaagcttctcagtttcaggaggtcccatttattaattgcagacctcaatgtctgtgctactggtgtaatgttcaggaagtggtctcctgtgccaatttgttcaagggtaattcccactttctcttctagaagattcagtgtggctggatttatgctgagatctttgatccatttgcacttaagttttgtgcatggtgacaggtatggatctatctgcaattttctgcatgtccaaatccaatagtaccagcaccatttgttgaagatgctatcttttttccattgtatagatttagcacctttgtcaaaaataaggtattcgtaggtgcgtgggtcaatatcaggattttcaatttgattccattggtctgtctatttttgtaccaataccaagctgttttcagaactatgactgtatagtagagcttgaagtcggggatggtgatgcctccagaagatcctttattgtaaagagttgttttggctatcctgggttttttatttttccatataaagttgagtattgttctttcaatgtctgtgaaaaactgtgttgggattttgatggggattgcattgaatctgtagattgcttttggcaagattgccatttttactatgttgattctacctatccaagagcatgggagatctttccattttctggtatcttctttaatttctttctttaaagtctcaaagttcttattgtacaggtctttcacttttttggttagtgttaccccaagatattttatgttgcttgtggatattgtgaaaggtgatgtttccctgatttctttctcattggaattatcatctgtatatagtagggctactgatatttttgagttaattttgtatcttgctaccttgctgaaggagtttatcagccataggaattccctggtagagtttttcaggtcactaatgtaggctatcatgtcatctgcaaatagtgaaggtttgacttcatcttttccaatttgtatccctttgatccccttttcttgtcttattgctgggattaaaggcatgatgccaacactgcccatccagctgtctaaatgttatgagaattaagaatggacttcaacctatacattcaatcagaaacattggcacacagttatatttcaaaagtttataaattttgaatacttgtaatttttgagtgttcttagaagttttaatgcaaacacattttaagtatgtgtaaatatatgttttcttcttgagatattttaacaatggtttgcaattttaccaattcctctaaggttggcatagaatcatttacatttattgatgtcttggaaactcaaggaaatatagagatagccttgagtctcttcccaatactcatctccctcagacttgcatgagtatgccatacggcatcatgtttacatagacaatttatgagagatgtaattaacactaggatcacattgctgatctagaacagaaaagagctagctaagtcctatcaagacattctgtcttcccaggatggtactggtcttgatatttcagtaattcttgagcatctatagcatgccaggagtattctaagatgtgcacaatgaagagtaaaaataatctgtgactatctaagtctcaaaagaaagccaatttgcaaagaaatctccaaatctcaagttgaacatcagtgtttggcagtttctgtgtgcatagctggatgtttacataaactaacacacctgcagaaccagctaatgttagggaaaatatagatactccatatctgcattaaataagcagagaaacatgctgtatataacttccaactctgtataagtatattctgcactttaacattacttaaaaaagtttcttaaattgagaagacaatttagccgatagcagtgagttcatgaattgtaacaacaggagtttaaagcctgattgttagttaaacaacaacatttcaactgttaaacaggtagagaccattttccaggatatggcgttttacatctgtgctctgttaggcatcttgtataaagtattgccaaattcgtgatccaagagtattgtaaaaccctcaacaaaaaggctggtgtagacgagaatgactcctactgaactgtgcacttccacagctggttatctaagagcttgctgctatattgtcattgtggaggtgcttatgagtttaccatcctaagcacctgaaccttttttccaagttaattctttttaattataccgtcagcaaactgcaaaatgtgagcctgtgaagttgttttcactgcaaatccagcaaatgtctgatgaaattcctctattttggaagtgaaatatcagcacctcctgtcccacctacataaatatttgatgatatgctatgtgactgtgattgagggagcacactatgggagtaaattttaagtctgatggatcatgagatgtactcatttagacactggctccacagccttttccagcattcccttatatgctaatatggtgacttgtttctatttgacatccttggatttcctaaagcaagaaaggccatggtggcatagctggaaccaggctatagagttgccacagtgtatttaatcatcttctagcatcactttatgcatagtagggaggggaactcaagattagctaatacaccgtatattactctagagctttttaccaggaaatagccattctttcagtgaggagatggtaaaataaattatgtactttagggtgccaggtcgtaaatttcacatggcagatctgtatgtaaacaatgaaatatagcaccattataaagttaagtgggaataatgggaaaaaaagaacaggtcaaactatgcatggatcagcggtcaataggtgcttgctgtgcaagcctgtcaccctgagtttagtcttctgacccaaagtaacggtggatggacagaactgacacatggttgccctcttaacctatacacatgtgctatggtgtgcatatgccattacatggatgagtccacttccacattttctctctctctctctctctctctctctctctctctctctctctctctctctctccctgaccccactctctctcacacacacactaatgatgaatgaagtcttaaaagtctgaggggaaatgagatacctatacaactatcaattaatttgtgtatgcacgggaaaatctaagagtatgaaattagtcttttgtgggtggcagagtagaaaaactcccccattttcttctaaaatataaaattggttcagtgttttattaaattaaaacagcaaatatatgtgtccaaggtaatatactaagtcagggtcttccatccaccttcaattaataagaatacacattacataaataggcgagaatcagaagagaaaaaggaaaatagctctgtacctgataaagttgattactgagaaataatgtgtaaaaaattttaaagtagcagtaataataatgaagttgcttttacaacaagcgattcagtgttctgaattaatctttcggcataatataagacgttattattctaataagtgttagcagtatattgtttcctaggatgtcaagctaagaaaagtgacaatagatgaagctgttttgtaagatcctgttacattttcatcttggggtgtaaaataaagtattatgtgaggcttgcctgagtctttacctatcttcctctagcattctggcgtgttcttgagatcactttgctgtgtatccgaccttatgatcgtctcttgtaggaggcactctgggtagaaagggagtaggagggagaggcacatttctttattggccttattaaaaagttgagtttgctagtagtataattatggagcccctgtggtgtcagcagttgcggttaattgagtgcagctgtcttttgccactcacgtgaacagtgactaccacactctgctgtgaagttaccgtaatttctcacacatcagttctcttagtccaagcaagtcattttgcaagtgcaggatcgagttgcttctaaatccaagcagtggatcattttgtcctatttactgggcatcctcttccttccccttctttatgtattcacttaaaagtgaggtggccaattgtcccagtatacctcagagcagattcccaagaatcacaaatcccagtgctgctgtgtggacacaatagcttcgcaacttgaagtccaaagccaaattcacagccatcatacaaaagactacagaaggatctttaagaaattatttcttttctttcttgagattataatatgacatcatttgcctcttcttccctttcccccctccctctaaatcctcccatttgccctatgcttcctccttttcaaaattatggtccctttcctcattaattgttatgtaattatatatatgagaatgcatatttttgtatgtttatatatgtgtgtgtgtatatacaaaacagaaagtgcacagctagccttagccacggcttcttctgtctcttcagttggggctggaattgcttatcctgactgtgctcacaactgctaagccttcgggtaactcttcgggtagtctcttactttcctcattttatttgatcctttctgcctttagtgttgcagtgaagtaacagggctagacgatgtcagaatcccttaatcccaagttgcgctgctctactcataaaagaggcacgctgcataatgacaataatacctgtaacttgggaacagctgataacagtcataatgttcacttctgtcagcattactgttttcaaagccttgttacatctgttatctcatcggatgccagtgcagacagctgcattttaagtcacttttgtggacttgaggatcatcttccctgacttcagctggtgcagatggcagggcctgaagagcaatctcttgctttctaggaagggccacacagtctaagaaatgtgattttgacttacacatgacacttttcattttcctgttgaatgaacagcagttgaaactggaaaggaaaaaaagcaagtggcctagttttgtttgtgtgtttcttgatttcctgtccttccagggcaatgggtggaggagaacaataccgcttggtagaatgtttaaaactatatcaaatgcctacctctttgaaggtgggtttcaaagccccttcttttcaatgtttttcactcttcttcaaagacagtaaactataaatgtattcagagcacaaattcatcagggtgttcataaagctgatagagcactgtctccaaatccaaggacaacaaaagcattctaggcagaaaactcttttctcttctggacaagaataagaaaacacagcagctgatatcagttagaatctctgtcttgttttcagataggacaagaggcatgtgttcgtgtgtgcgtgcatgcttgtgtgtgtgtgtgtgtgtgtgtgtgtgtgtgtgtatgcacgcgtgcacgtgaaggtagtaaactccattctgtaatgacttagaaggaataaatgataggtaggtatggagaggattgatagaagagagatatatgacatataataaatagatgatatatgacaggcaggcaggcagatggacaaacaggcagatgttttaatgttttgtccagtttctctaaaaatctatttcatgattttgtttgaatctgaatgggatatacctgtgacccgagagtctcagaattcttaaaacttcagtcacaaaacttttcaagactataaaaacaaacaaaactaacctctttaaaatcatttttcctacatgctaagcatagtacatgttcacgtactgtgcaagtaaatgtgtttacaaacatggttgtgtatttgccatcttcctagtgtggattcaagacagcagaggaggcaaaacaagatcctcatcctcaaagacttcacatacagtaacagcaccttcaaacctactgcatcaggcttcatccctttcccattaagctttaaatactctttcattcgcttgttgatcctatggattagctcctctgtatgtcaataggtgagcaattgttttcctggctctgtatcagcttccaaaccctttggaactctgtcctcctttttcccattggggtcactattaaagactattggaaaactgaacttgcctgcctctgcatgcccctagtgtgggctgcttagtagaaagagattgcctacttatttgagaaaatgatgaggtccaggaaaagcctcttcctgatattagatgttgaactagagatttgcataatgaccagggattggtttaaatccatagatttgattcactccaaattagtgttcaatcatgtatttgcacagatgttcagactctgacttgaggactttcagaaatctagactctacagagaatcacagcagtgatagacatactcacgcctggaatacccacaactgtcaaatagctcattcaggttaaatacaaaaggagaacaaaatatcttcttatttgttgtctccaacacagcccacaagtgtctctttatataggtttactgatgtagttatcattaagcttggtatgtagctgggggtgaccttgaacttcatgtctgtccatcttgagtgtaggctttagaggtatggccatcacactcacttttatgaggagttggggatcaaactcagtgtgttgttcatggaaggctagcatttcacccactgaactatatcagcacccaaacttttaaaagctgggtatagacattgatgtctccatcacatcagaaaaaataacaataaaacactggcatagatggaaaattggacaccacatgcattccaaggctacttctaccagatagactttcagaaacacacaatgattttactatgtctcttttgtctgggatgatctcagggtctctttcatggtccctattccttctctctttttaccttcatcatctctcaatgattatttttcttcagttgccttttttattatcattgcaagttatggttacctttagttattttctctataacctcacaagtttgttaaaatcaagaatggttttgtttctttgctttgggtttttgttggctcccggaatatagaagataccatatatgagccatagcactttgcctgctacatataacaccgttttatctgttggcactagcattactcctgttttattgtaattaaagagctgaggctgatactgagaaagtaacagagtcatctaaaaatctaaaatggctcatctaaaaaggggacctaattgtgtacttagaaaaagtgtagactggaattttaaacaagtacactctcaattgcaatgtttttttatttcagtcaggatagaggagctatattgcgaagaaccacaaccatcaaatctcatggcttaaagcaaggggtctatttttcactcacggttatgtcttgattttgacactttgcttcacgttggcttcaagttaagagcaactcttatctgtatgttgttagaaggtaaataggtagaaaggaaataatatgatagaccacttacccatttttaaaacttctgttgctagacctggtgctgggtgctgtaatcccagcccaaggcaataggtcaacatggaatagacagaaaggcactataagaaaacaggtaaataaagaaataattccaacagaaaaatccttctgcttaaaagtgtctataattctcatactttgaggctgaggcaggaggattataaattggaggccagccttatacacatcgaaaaagccaagccagcataagcaacaaaaggaaatcctctgggtcctttatcggattagaattggaagaagtgatagtctaagttagaaatgggcaaaacactggggagataagagagttgaaaatatataaaggaaaggctttggactggatatgactgttggctcagcttagtaagtggaatagagaatgaaataaatgctaaagaagccaactgattgctaaaacagatgcgaaaagtgaaataaagttcttaaagatgatgactcatttatttatcacatatgcatggcaaatgtgttcaactgttgatggtactattgatgatactatatgggtgaagacaacatctggaatacctgtttagtagaagagaataatgaagcctgaggaagctttggttcacctagtatcccaccaccacagagttaaggagcaggcatgcaaagccctttgatctggcttctgagtgcatcctttaaagtgactgctttctgggagtgaatttattggaagaagacaggagaatgcagaagtagaactcaggtagacaacagcatagtcaacatatcaacttaagtatgtcacatgttgcctcagactgaattacaggtgttgtaagtgtaattgcttgctaattctttacttctgcagtgcctctctcagcacagaaacacagcgggtgtttataaacatctcccgaagctgtcagtattttcatattcattagaactgtctgtagctgctgggatcacccagctctactgcagtagttgatgtcaatgtttatttggtttccagtcttaagagagtcatctggtctctcattttgaaatgaataatgacaggtggtcagaatatgccttgcagcacattctgtatttttgaaaaagcctcaatgacaataaattaaatactgagttgtatttagatcatactgttgatttttaaagggaagagggacattgaaccaaatgaatgtatgggcaacattcaatggacttaatagattttatctctctctctctctgtatgcacatgtaattatatatatgtaacatatgtataattatatatgtataattatatatgtacatatatatgtaacaacaatagttatagaagttgaagttatttggtgggagaaggacatggaaaattatataactatagtacttgtgtgaaatttggaaaaattacaattttatgttgaaaaaatatgtcttcagtgaagaggaggggtgaggaagacatgatggggcagggaggttgagttgagggagaacagaagagagcaagataagagatactataatagagggagacatagctttatagagaaatcaggcactagggaaatgtctggagagctacaaagatgacagcaacaatctaagcaacagaggagaggctaccttaaatgccctcccctgataatgagattgatgactaattcatatgccatcctatagccttcatccagcagctggtggaagtagaagcagacacccacagctaaaccttgacctgaactggaatccagttgcagagaaggaagactgatgggcaaaggggtccacaccaggctggtgaaacccacagaaacagctgacctgaacaagggagagctcttggtccccagactgatgcctgggaaaccagcatgggactgatccagaccccctgaatgtgggtgtcagtgaggagaccttggaaaactatggggcctcttgtagtggatcagtacttatccctagcataggaatggactttaggagcccatcccacatgaagggatactccctgagcctagacactaagggggttagcctaggccctatcccaagaataagacagactttgaagaccccctatggaatgactcaccttcccttgggagcagaaagggtatgggacaggtagggctttagttgggggggggggtgcaggggaagatgggagggaaagggacctgggattgacatgtaaaataattttctttctaattaaaataaaaattccaagtgcacacatttttaaaaggttcagatacaaaaaaaaaaaaaaaaaaaaaaaaaaaaaaaagagtggcagaggtaagaggccctgctttggcttaacagttaatagtgtatgctgcttttgttgaggacccaagaacagttcctagcacctgggtcagaggacactacctcctgtagctccagttacagaggactcttatgcctccagcctccacagtcacctccactcacatgtacagaacctgctctgtcactatagacacacaatttaaaataatattaaaaatccaaaactaagtcctgctttgagggacatctgttctcatcacagtcaactggttccttttgacctttgtttccatttctgacaatactgcacattcccaaattctattaaacctgcatttcattttcttatctccctgaaccaccaaagtcagcttcccttttaatttctaagtttttatcctttaggttgctttatttcttatctagcttcagctctgtttgtatatctgctgatgaacaatggtccatgtatcttattacttgggaaggacttgacccagccctcaaaatatgcaaagtacctgcttcctcttgtctccaaaacccagagcctccttgccaactaatcctgtatacgaagttgatatcctgcctagcttcctggtgtgtccagatctcagtttgtctgtgatgggtttttgtttgttttgttttccagggtgtttttgttattattgttatttgtttttttctgagacaagatcttattatatatcccagtctggctcggaacatgttatcttcctgcctcaggcttctgggtaagcaccattatgatgtggtgtgactttaagttttaaaacaagactgtcctatgcataccagaatgactacactagacagagctttagcaactctaaactcaaactcatatagtttgagtctatatgagaaatgaaatctatttacctttactcaacagtaaagaatactttgtggttctggggatcaaatctaagctcttactcattttaggcaattgttctaccactgagctacatccaagccctattccctattagtgctcaacattagtgatttccattgcctgcagcactatgagtgaagtttattgagttagcagttctttttctcagataacctggagttctaggctgcttgtttttctttgccagagatgtttacctttatctcagatgttgatagacattattaaattctaaggtgtcactcttttttattctttatttttatgaagtagttgagagttatggcagattctaagtgtctgggcttgcttactggtccaaagtcacctgatatagcctagaggaattaaatcagtatgattggaggggccacagcacaactgaggctgtgacaattttattgagagcaatcagacttttatacctttatcacaaacagattattatggtgatttccaggatcaatacagttgtagttgccaggatacagtgaaatttgcatgtcatacaggatacactagatcaatgtcaagctcagttgtcctgtcaggtctttatgcttccttgactactaagggaacttacagagaaacacaaagcaacctgagtaagcactgcctgaaggagtacatgagtctctcagggattggaaggcacattgtgccttctaacctgaaaaacctatgattcatgtgtctcaaggcagctaggccaaggcaactccatggttccctgcagcagatgccataacctcgtcagctgaaaagctgaagcaggaaaatgattgcgtttgatgcaggcctacaccacatggtaagaccttgttttaggaaaacgagtaaaccttcaaaccttcaaatctagaatatcttgagcaaggcagttccaacatggtgcatctcatataaaacccaactacttgcttatgtcacagttgcaatggaatggaattttgtcacagactcttttagaagaattcctgttaaaagagtatttactttatactctattaaacagatagaagttttagtaaagtattttcacttcaaatacagcatttctcaggaactttgaaagttaactatcaggtctattcataatagggtgaccatgctgacactgacatctgctcaggatgtctacttatctagcagtaatgtagttttgatacaactatgtctctgaatcattcaattaataggagcaaattgaagacagtggaatgaaatgtttgtgagctcacatctgcttgggaaataaatgccttgatttcatcttaatacttgtttgctacgaatcttgggtattgttttagtattaattcacaaataggaaacacttccctgtcagttcattactgtgcaggaattatgaagcttttttatcaagtaaagtgtgccactgatgaactgcctgggacaggagaattatgggataccaatgaaaattgagttttgttacaggcgagcattttatattgagtaccagatccactgaaaaactataagtaggttactattctcaggaaaacctattaataaatccaaaagtttcggtatacctgaatacttgtatttcttccacatgttatcattaaatatctttatggtaaaaatagaatccatatcaaaagtgctattgtgtttcaacctcagtaaaaaaaaaaaaaagcacatggtaaaattagtttgataacttgagtgcttgactcagtcttaatttttcatggcctcttttgagttcaccatcaggtatttattactaatattgataaaattattctatcagatgataaagactttaaaatatctattcctatgaaacaaaaagtgttactttcattttgacaagtaggtcaaatgtaaaacttaaaagtctgatgagtatgtaattggatctccagctatgtttcctcattctgacctttctgttaatggatcttccttgtattagagggaaagcactctaactgactgaaattttggttagtatattagtgaaacatcttccaattaggtctgtgcatatatttggaatatcaccatatgtgcagttaaaggatgtaaaatgcctagacatgtcctctgtgggtctttcatttggattcagggtcctgtgtttgagagtgacttggtttaactttactaaggaaaattctagtcattgtatttttttgtttcgattttttttattgagctccacatttttctcaattccccttccctcctgccttctccccttctaccatcccccatgtctcccacacagcctatttactcaggatatctttttccccaaccccaggcagatccatgtatctctcttaggaccctctttgttacccaggttccctgaggttgtgaaccatatgttgattagcctttgctctatgtctaatatccacttatgagtgagtcatattatatttatctttctgggtctgggttaccatgcttaggatgttttttccctttctatttctgttcatttgcctacaaatttcaagatgtcattgttttttagcactgagtattgtgtaaatacttttttttaccacattttctttatccattattctgttgaggttcatctaggttgttttcaggttctgactattatgaataatgctgctatgaacacagtcaggcaaatgtccttgtggtgtgaatatgcatcctttggatatgtgctcaaagtggtattgctagtcttgtggtagattgattcccaattttctgagaaactgccatactgatttccaaagtggctgtacaggtttgcacttctgccagcaatggaggggtgttccccttactccacgtcctctccagaatgagcttcttcagtgtttttgatcttggccattttgacagtgttagatggtatctcagatttgcatttctctgatgactgaggatgttgagcatctctttaaatgtctttcagccatttgagattcctttcttgagagatctctgtttaggtctgtacaccattttttaaaaattggattatatggtcttttgatgtctagtttcttgagttcttgtatattttggagattagttctatgtcagatgtgaggttggtgaagatctttccccattctctaggctgctgttttgtcttgttgaccatgtcctttgctttacagaagcttctcagtttcaggaggtcccatttattaattgtccatctcagtgtctgtgctactggtgttgtatttaggaaggtgtctcctgtgccaatacattgaagggtacttcctactttctcttctatgaagttcagtgtggttggttttatgttgaggtctttcaaccatctgtacttgagttttgtgcatggcaataaatatggatctatttgcattcttctacttgttgacatccagttatgctaacaccatttgttgaaaatgctttcttttttccattttacagttttagcttctttgtaaaaatcaggaatttataggtgtgtggattgatatcagggtctttgattccattccatttgcccatctgtcttgtttttatgtcaataccaagctgttttcattactgtagttctatagtagagtttgaagtcagggatggtgatgcttccagaagttcctttaatatacaggattcttttggctacccgtggttttttgtttttcctagtcattatatttctaactgaaactcacctgcaggcattccttatagtctttcctttattttgcttgtgctttattttaacagtttaaaatgattaaaatcacctggcatggtgatgcaaccctataatctgaaaactcaggggggaaaagacaggcttgttattggttagttggagggcagcatggtctatatagtaagtcctaggctaacgaggactacacagtgagtccttgtttcaaatcacccaacttgggttggcaagatggctcagtgggtaatggtgcatacttcaaaagtgatgacaaatatattacaagcatcattttaaataagtcatttcataaaaatgtgtaaattgtttttgggagatgcgaataaatgtctgctcattccagattgagcatggcaataggtaaaaggtaaggttccatcagtctaagttgatgaaccaatgtgtttatttggcttacaaaggtttgcttacaggagaatgggtagctctcaaacagctgcatctccataaagtcctacccatcatggatgatgatatcatgggatccaaaccatgaaattcccatcttcagttactttctgcttcctgtgtactctagcattgctcaagttcacttgtagctggtagatgtgtatgggggcatacagaagggaataataacataaatttaggcaaggtggtcctgtgacttacctaccattcttttgttttgttaaaatagttaccatgtcttctaggcaaaggtaatagctatacccagatgaagatgggttgatcatgttcagtcaagaattaaaagacacaatatacaaggaatacagaatattatataaagataaatcacatgaacataatatcatcttttttccattaaatttggatattacttcattcccaaatgtcactacttcagtaacttttcttgtgtcacaccatcttctaagtgaaaacttaaactcatttatctttgaaaagatcttatagggcttaattgaaataactagtgactcacaagttgtgtccatataaaaatcattgatttgttcatgagtaatagatagatttatttaaattttccaaatatacagattggtgaaataaatctcaatctctacttacgtttgaagtaacaattttcagttattattgacatagcatttgaaagttaaaagtaaattttcatttaaataataaaaaatcatagaatgctagatacacctttctggacctcatttgaaaccataaaaataagtgtcaattattaatttagagaactatgagtgctggacaaatttatggaaatattacaatacttccatagtactattttgaatcagtgttactacaacttttaaataggaacaatggtgtttgaaagtatttagtactatttcaagatttctgtagtagaaaacttaaaagaaatcaaatgccacaagtaacttagattcactaactaatggcaaaattgctactctatgaatttcctgttgaagaattaactaataaatggatgttgttatccctgcaaaatatattagtttaaaatatctttacttctacattaagatgaaatttaaaattcttactgaacataaaagtgtcataaaattctccatagcttctaagagcttggtttcaactccaccagtaggttttgaatacttcttggagcattcattttgtcactgtggaaaacttccttcgtaacagtataggttcttggaggtaacttttttcaaattagattaaaatataacatttgcctgataattattttagagtttgatgatagaggcatgtaaaaaggtataaagaagtactgcttaatccacttattatagagattgggactgctgagtaggttgtaatcaaggaagacttttttgaatatgattatacaaatacacatatctaatgtgattcattaaagcacatgaaaggatagaggagaggaaaaaatcactccagatagagaaagtagaaagcacagaggtttgaggctgtgtttgttttcttaattttgtgtgtgtgtggggggggggttgtgtggtggaagtacccatgtgtaaatatgcaggctggagcaggacattgtgaatcttcctctaacttgctccaccctgttgccttgagacatggtctcttagtcattgaatttgggtttcaactgtgtgtggccgcaaagactagggtaactggaacatgcagccatgtctagcttcttatttcagtgctgaggattcaaactcatgtcctcctgcttgcagagcaagtactcttatccatctagccatctcctgagccccaggatatttaatgtttggagaggttccataactttaacattcctaaatgctaagaccatcaaaggcacatataggtaggtggaggggagaaagtggaaagagtacacaaagggcctgaaattccaggccaaatgcctgggttttctctagtaggtacttagatagccatcatacagattgaagtaagagaggaacatggttgagtgtgaatttaataatcattgcgagatactgaaggggaggagaggaaggaagacagtgcatttggctggagaaaagatgacatcatcctaggtcaagacagaaaaagtggaaagacatggatggattttaggacatagactcttaaatcagctgtataaggtgaacaaattaaatacagagaaagcaaaaagaaaaggaaggagtattaaaaattccccagctagagtaagtggtctgtagctatcctgtaaaaactggaagaacagagattcaagaagatgaagagtagagatagaaggggatgttcctgacatcttaagagagattctatatgaaattcatcacaaaatattgtttgaattgagaagctctaagatgtttttcctctaagaacaataagaagcaagatgaaattagcacacaaaaagtaaatttttgttccattttatttttgaaaatgtgtagttttggcggtgtgttctcattgactttatgtataagtttctttgactttgggaaacttggtcaaaatcatagtctgtattctgcggtgcccagtgaatagctattgtggaagtgatgctcgaagcgggagataatgtcctacagcgggatttaatgatttctcagggcagtcggcaaatgttagggaaacataccagtcttgtaataaatagacaaggaacatttgttcaaggcatgtttgctcagagtcggggaaaaacaacattctgggagagaccatcagtaaatgcaacaaccatagaagaccgtgggccatgaggatgtcacccccaaaaggccacaacaaaacagagaggcttgttagggagtggtctgtttataaagtgccttgagtactgggagaaataaacaataagtggaaacatagataacaccattgcctttataccttttctcatttgttttcatctgtcaactaaaacatctgacctgggcatccagagaggcatttcctctccttctccttttattaccttctgaagaggcctatcttcatagtcttagaatctcctatcccactgccacattttgcttatcgattcctgtttgtaccaggatatttggagaaatgcccacttcaagaagttctagttatttaccaagatccagatttgtcaaacatgtagaaatatgcataaccaccctgcacaaaaaatgtttccttgatagtctagaaagtccatggccctgtgttaatatttgttagattcataggataaactcctcaaggtgagaattgtgctgagtgtgtcttagatagaatagattctacaatataaggagtgaacacaaggagggaatttgttgggtaagtgaaattaaaatataggataaatttgttttctaatttaaatgagctcggtgcattttcccacgtttgtttttccaatgaataatttcattgctctatttgtatttataattttattgggtctgtttcttttatagaccaattgtcttcaaatgctttcaaactagatcttgcaatccaactttaagtctatgaatattcagcttctgtgtaagaatttcattctgatattgacacatcgtgatcacatcttccctaatgcatttctttccttgctcatgaaaattgatagcattcatgctcatcatttacatgattagaaagaccgcctctctcccagtgtgtgtccacaggaatgttctttgcatttcacatgttataagccacctgtgttcactctcagcctctcctgatcatcttttgttatttgtattccttcagagtcactctgtcactgattgtcattcttcctgggaatgcagtttgcagtaatctcaccattgcattggcccacgagtttggtgcactttgagtcatcgtaacttgaaatacattgagtatcatagggctggggttttttttttgttgttgttatctatttttttcccattgtgaccattctgtatgactgcttatcttttaaagtggagctgtattaatttatgactaccttttagccagaaaacaatcagcattctagataaatgtctgtaaggaaaatggcaaacatatactcagggagaaaggatcagaagagcctttgaactgagagatttcatcattagctcatctgacttatcatttgttcactaggggatatataataagacattataagatggaatctacatgaaacaaaaagcaaaatagtgtgcatatttatgtagtctgacctatactcaatagagaaaagtgaaagacaaactttcttatctttaatcaaaatacgtaatcttatgaattccttgtaaactacaacacttggatcgactgataacaagaatgctacagagtccaccttgcttgtaagttacgatgttaaatattcctgattgtcccataaaacaacctagatgtagcataaagaaagcatttcaataggaagggaaagttcactgctttctcaagtttttgttactttactgagaaattcaaagaaaatgtgaatgttttcttcaccaaatagcaaagattattgctgttttatttttctttatccctctcctcaaattagctattccaccttaaaaaaaaagataagtcaataaaccaatgttttcaaaagcatttgtcccaaagtgatggctgcttgcccacacatactttagctctacacatcttttgaggcttttgaaaaatcagtgttggccaggaggtggtggtgcacgcctttaatcccagcactcaggaggcagaggcaggcagatctatgtgaattcgagaccagcctggtttacaagagctagttccaggacagcctctaaagccacagagaaaccctgtctcagaaaatcaaaaaaaaaaaaaatcagtgtttgggaaaatagagaatgagataatatattgcaaatcacatgacacatgtctgttgattaattgatattgctttcaggacttatctatgctctcttgacactaaaatttctagtaatggtcctttgttgaagaaatctcattcccctttgtgttttcagaggtaaattctcatggaacagttttgtgcgcctactgtaatcttgtctgatttctcctctgcacctcacacaccttttccctatcctctgagaattcctcctccatcccccatcctcctgcttattgttttcatgggcgtccagtccaatcctttctcattcagagaaggtgatcccaggtgagttattcttttgctgtctttaaccatatttatagtactgaattcatgcttttccattaagctactaatttatgaacatgctgtggtatcaaatatacaaatgtttcaatctattcatgttttaaaactggaaggtatttttgcagcctcttcattttcatttctagtctcaattcatgaaatctatttcctgttcagttaacactgggggccctgtgtcttcctcctcttgttagctcctgcctattgtctgttacagtggcttactgagtttctttctgcaaatatccactccaatgaagtctataatgatgtcaataaaattcattgtaataaagaaccgcacgatggtagtcctttgcacatagagtttaaaaaatattatttcagattttttcagcctgtacatatctgtgaactttttcaaccttgtatatagtgatttttaaggtctaaccatgtacagcacaatattctcagctgctgaatatttgactgtcactcataagctggcatcagtctccagcacatatacaggctgttactccattgatcccactcttccgcaccagccaaaccaaatcctctttctgttgacatgacgtagcatcactctctttaccctggaccaatgggaacttatctattataggataactaatctgctggtctctaatatttgtccatttgaagcatcttttcaacctaataaattaaaacctctgatttttgactcacttcattgctctcatcatggactgttaacttcttcagtccattgtatctcacttttcttgtctctcaaaacatggcaatataatactaaataaactgagtaatatctaccactctgtctcataactttttggtacccccagatctgatggacacattgccaatgtgatcatacatgattcagggcccagaagatccccatgttccaagtttaatgttctgtagtcatcaccctgaaataattagtaatttcatatttgaatttttgtaactagaatttgatataatattgaaatgaattatgtgaccctctccccttgcttttcccatatccaagactgattctagttttctgatatcattgaaccttgtaagactattcatccccattcccaccaaattcctaccagtgaccaacactcatggatagaacctagtgtaattaagtctttactccatctgcctgagcccggctgccacgtgggtgctttccgccaagccacccaagttctgctggccgccatgttaaggtcccaagtaacatacagagacttatatcaggtacaaatgctgcttggccgatgactaggatttctcatctgctagctcagtcttagttatcaaccataatcataatctatatattttataagacatcagaccccagtggcaggtgccctctcttgctgtcggatcacatggtggctccagagcagaaagtaggaggaagagaccccatgcccaaaggttcccagaggaagaggggaacctgctgtcatgagcccccagtcacctgagcccccagtcaccgaaagccaccaggcgccacaagccaccacaagccaccttcccatgactagtcaagcggtagtgttaagaacttccatgtaaacttcacaaaagctaaaaagggattttagcagcaaaagaacagagacaagcacgacttcttgttaacagcattttcttggatggtctctattttgctagagacaagcagagactcaagcagttcctttaagagaggttttctgactcagcctaagcagaaaaaatacagggctcccttttaagaggcctggctagctcagttggtagagcatgagacttttgatgtgggttcgtgccccacacagctggcagtggcagtgaccacatctccaaaccggcagcatgcttgatggcaggatagaccaaggaagtgagcatagctctcagagctgatggtaaacggatctgcaccatctgggaaagacagtggctaagaaagcctctgctttaactttggcggtgttgtttaacagataaaagacttcgtggccagaaaaaggtaaagatttacaataaagactgattcagatgaagaaaaacctctaaaggtttacactctgtttaaaaatatatgtaggcttgtgagagaaaaagaagcagaggcaaaaaaaaaaaaatagagtagctagatgacggtggcattaaagatgactttaatcccagcctaggtaccaggcatgcagacactttggtgagacaaagtcctaacttagcagtgccacaacaggttaggagactgccatgacatgtaggaggctcaacagggagaacccccttgtcctccctgggacttctctacctctacctggaagatatctgtgtaggtctagcacgtgacagagatggagttttgtaggcagcagtggtttgcatgttctcagtagtagttcagaggcccaaaaatgctttgagcttgcctgggagcatcccttgaagtaatgcggcaataagtaacaagtaaaaacactgggaggaccactgagtggagatggacaggaagcaagatgaaacttcatattttagtacctataatgaatgtgttccaattttaaacaaaagacacacatttctgttttacagtatgacctataaattaatgagtgtatcttggctcttcccccccccatgtgtcccttcactcctgctgcctctctgcacatctctttctgtaacagtggcacttttcatggagaagtaggaaatgttccctaaagaaagcttttgtagtgttcagtctaggttgtgagtcagactgctggattcaaatctcaattcaacttattagctgctatgtggcttttgacagcttattcagcattttttttttgcttgagtttctctttttaggacatttgaatgttacagaatatttatagacttttccagaatatgcataggacattcataaaattaagagagaaaattcttggtgttggttttaatttttattgaataaagcgtctatttcagaaggagctggttttttgtttgtttcagtggttacatctgcaaacaacctctattctaaaagtgaagttggttatgtgatatttgtaactggttactgttcacattaaataaaatttatttatctgtctgatcatgaataattccttaataatattaatgaaagtgattggatctttttgatgaaattttctcaatgttttgcataattattaattgatggtcttcctatcctctcatttctttgcataactgttaaattagctcatctttaactttgtagtattaaatttgatgctatcttacttttcccacccctcttttaactgtttcagctactagatagagaaataaaagcccttggtcaatacatgtaaaaaatatttagttcctgaatgccttgtatttgtcgttggagtgattattatcaatcttgctgatttctcaagggagactgtgtaaatacagttcacaatcctgttgctcttaatctgtgctcttgagacaagaaaacactgttgcctcttgcattcttctacagacagctctatttcattaaaaatacatgggtagccagcatctttgaaaatgccttcataggaagtatacagcatcagatagtttacacaagaatgtaagtaatcctagaagtagcagaatggatagcactgagataccataccatatgactatgaaatgatattgacacttttgctaactttgcttaagttcattatctgtgaactggccgtatcatcaagacaaaccgtgcattcactgacgtttggactgtacgtgtttcacaaaagcactaagaattccgaagccagcttcgctggtaccttaacccatttcttgatgataaggtgtctgttgctttcagaaaaaaataaactgtggtaaaagtaggtgtcacttaaattgtagggaacatacacagtgagatagagctgtgtttgttttctgtccttccctctagaaaggaagtatttgttagtatgggcccctaatagcacatgccagctgtttgtctttgaggtaattatgcaatttctttgagcctcaattcccccactatagaattaggttaacaatatttaattcacattcctatggggaggagtgtgtaaaacattttagttaattaaataattcattctcactcctactgtgtgccagacacttcatggattctgagggtaaggaggcccagagctgttgttctcataaagactagctgttatgaatagaattcctctaaagtggtaattaccattataatcattttttccctctaacttaagacctcacgactctgtgggtgcttggttgattagaagaaaacaatatactacggttaccttatctctgtcctttagattcagctttgtcttctggaacgctaagtatcagttggaatagtttgctgtagaatgctcacgtgcaggaggatctccaaagtgactcagagtagccaaaagcttatggcaggccattcggacttaggggtttgtgaatgtgagaacagtctgtaactttagtgcagaagtgtataaaatattatcggtggtaatttgaatggaccaaatagacaaattaacttagaaagtatcatttaaaagaaatcgacctcaaaagtatcatttttagaaaactcatgccagctacttttttgtttcctttcgttttgttttgttgtcaagtgggagtcatgtgcaaagagagaacagcaattgaggaaacattcctaccaggctgacctgtgagcaagcctgtagggcattttcttgattaatggttgatgtgggagggtccagcccagagggattgtgagacctcctggtaggtgtcctggggtgtttaaagactcaatctaagcaagtcagtgaacctgggtccctcatagtctctgcttcaccttctgcctccaagttcctgccttaagttcctgcctcacatttcttcatgacagaacggaaagtatacgaggaagtaaatccatttctccccaagttgcttttggcaagagtgtttatcacactagtgaaaactcaactaagacatgcttctactgtgagcatttgcctcaagaaagcaaatgtttctcttccccagaaaggccactaacaattgtccaacaaagcctttctactcaagtctctcttgatgaaccaatgcatgtaattaacaattatgttcaggaacatgggtgcagggtcacttataggagcaccggtaaaaatcaccagtggccgcaccactgaaaaaaaaaaatgtctgtctcaataaccatggattgcctatatattctcagagagatggaagccatgtgagcccctcccacctccatgaagaagcaaggctctgttttgtgtggatattacagaggtcattactgggacaatagtcctgccacatctggagtacagctcatacacagatagttcagatagttcagagtcctttgcttctgtttgctaagtactatgatcatacatgagcatcactgttccagactgctgccagccccccccccccaccgtgccttagcatggaactgcatccccaacttccctgtgtacacttaatggaatcttcattttgacagggtttcactctgttctcctgactatccttgaacttgctatgtagaccaggctagactcaaactcacagagatctatgtgtctctgcatcctaaatgctgggcctaaaggtgcacaccaccatagctagccttaatgaatggtgtctatattttcaggtagatcaaaatatgtttacttaaaaaatttgggggaacatgggaggaggggagggcaaggaaatggggggatggttatgtaaatatgagtaattaaaaattaaaaaagacaataaaaacaataaatttcaaaataattcatattggaagaagatcacaacagtgagtataggtatgtcctgtttagttactatagcaacagcagctgcttttagttttgcaagaatgttgctgcattgagcaattcagttaagtgtggacctctatgtgccttaagtatacatttaggagtttgtaaggactatcacacagttcttctagatacctctccaccaccttattcctttttttttaaaaaaaatctctcagcacacacacacacacacacacacacacacacacacacacacacacacacacacacacacacacacacacacacagagagagagagagagacgagagagagagagagagagagagagagatatacacacacacacacacacacacaccccatacacgggtccactgcctcttgtcttcactttgagctatagaacatgggatctaaaatagtcttggtttccatttataggagagaaggtcaacttccctttccaaatatcatgtttttaatccgtattcatgaaaagaactaattaataagccaattttccagaaattagtagattaacccctctcaaatatattagcatatttatttgcattaacaaatacatttgtattataagtatgtgacacagtgctatgtgacaaatatcaacgggaggtacattggatgctggaatggaggtcaatagggaaaacaccagtctgtggaacgttctgtttctcaaatcagatggcagaggcagctgttcatccatttgcaggtgtgaggttgctgctttctgtcatggtcattaaaatctaattgtgtggttaaatgtcctccatttttctgttctcctgctcccttgctatttgtgggcacacacacacacacacacacacacacacacacacacacacacacacacacacacagaggcgcgcgcgccttctttcagcagttgtaactttctgggacccagacaaaccattcctactttcatttcattcataaccagttaaccttgagtgacataagacaccagtgcatcatggggacacttttctcttaccacctccacttacttgttcaaaggacttttctcttgttactgggacatgcttagaactcacctcacgctggaaagaacctcagcatctctcagttggggccagtgggagttttggcaccagcacgctgctccttgcctggaggtggagtgactgggaggccagacttctcattggcccctcagtatagtggaaaccagcaccagtcaccccaaatggaaacctacgaatgcctgttctatggggtgtcgttctttctctgccagtgagccttgaaatgagttcatattaaaagccacactcaaatcctggtctctggtgtttctggaacaacccaacataaaagaaaactgtaccacagtatttatttttctgtgaacttatagaatctaaaaatcacccccaaggttatcgactatcaaggataccaagaaaatctaagattttatgagtccaatgtagttctttctaaacaacactgagctattttaaattatgattggtctcccacgacccagtatgatgtgcataatgtcaccctccaggaacccttcctcctgtgatgtttattgccgcaataggtgccattttggaggtacctatcagctcagttttaacaagcttttgtgcttggttttatatcttatactttaaatcattttggtttgcagaaagttcatgtttccaaatgaaaaatgggtttttaaaaactacaacactcactgtaatatgacaccccaggacccagttgctgcagtcactcatctgtgaccattaagcatctctccatagtagcgtttgcaaaagaaatgttgggaagattgcaccaattgcaagaagattggctaggaggatttatttcctggagggtttttttttttctgtgctcatcatgaaatgctattccctgctgggcacagtggtatatgcctgtaattccagcacttgggaggtaaaggcaggactctccagagttcaaggtcatgcttggctctgtagtgatgctgaggctagcatgcattatagaagtcccatctcaaacaaaaataacaaaaattcctactggtaaacataaaaagtcctaaatctaaatttttctaaaatgtgtactttttccctgggcatggtagcaccaccatttaggaggccttggcttggggactgtgagtttgaggctagcctgggttacataataagtatgaggttaccctcagctacacaagaagaccctatcttaaacaaacaaatgattccttttttactaagcgtacattccatggtggcagcatctagattatattattcccataaatgagcatttgtcacaattgggcaaatttggcacactaactgcagatataataatacaaagttttcagaagggatccacttttcaattgtttagagagcacttaacacttagaaataaactcatctcctttgtgtataagtaaactaccctagagaacatgccatttttcttctcaagaagacatgtaattaagttgaaataatccagttctttaatattttagcatggtttcaaggacatttccaactaggaagatgtaaagggcagtgaaactacagtacagagtatgtagatactttttaaatatatgtacatgtatgtgtataactgtaaataagcagatacatatacatatctagggctgcatacttgggtatgggcaatttatgttttggaactgttctggttgcctttatatgttatgattagcaacagaatatttgtttctatctatcaacaagaaactctcaagtctaatgtggcactgcatgcctataattccagatcttaggagacagaggtagagggagataaagagttcaaagccagtgtccattacattgtgagttgagttggagaccaaccttgagcaacatgaaaccttgttacaaacaatcaaagacacaaataaacaaaaataacaaatgtccttctaatatgtagggggcaaatacatagcaagtggagatcactgactgagaaagtatgtaggcaaaaatattaagagtattctagtttcttctagttccatccatttgcctgagaatttcaagattccattgttttgttttgttttttctttccactgagtagtactccattgtgtaaatgtaccacattttctctatccattcttcagttgaggggcatctaggttgcttccaggttctggctattacaaataatgctgctatgaacaaggttgaacagatgtccttgttgtatgaatgtgcttcttttgggtatatgcctaagagtggaattgctggatcttgtggtagactaattcccattttcatgaggaattgccatactgatttccaaagtgtctgtaccagtttgcactcccaccagcagtggaggagtgttcccctttctccacattcactccagcatgaactgtcattggtgtttttgattttagccattctgacatgagtaagatggtatctcagagttgttttgatttgcatttccctgatggctaaggatgttgaacactttcttatgtatctttcagttattttagattcctctattgagaaatgtctatttagctctgtactccaattttaattagattatttggtgttttggagactaatttctttagttctttgtatattttggaaatcatccctctgtcagatgtagtgttggtgaatatcttttcccattctgtgtgaagccattttgtcttgctgactgtgtcctttgccttacagaagcttctcagtttcaggaagtcccatttagtaattgttaatctcagtgtctgtgctactggtgtaatgtacaggaagaggtctcctgtacctattcgttccaggattatttcccactttctcttctaataggttcagtgtggctggatttatgttgaggtctttgatacatttggacttaagtttagtgcatgcaatagacatggatctatctgcagtcttctacatgctagcatccagttatgccagcaccatttgttgaagatgctttctttatttcattgtataactttagctaaggacctcttgtagtatatcagtacttatccctagcatagaaatggactttggaagcccattccacatggaggatactccctgagcctagtcacactggggtgggcctaggccctaccccaaagaatataacagactctgaacaccccctatggaaggcctcaccctccctggggagccgaaagggtatgggataggtaggttgttagtggggggtgggtcaggggaggaggggagggagagggaactgggattgacatataaaacaatcttgtatctaattcaaataaaaaatggagaaaaaatattgagagtaaactagttgtatatgacttgtctctcatacaactactctgaatgatttttttggtgataaaatagcaaatgaggactttataccattggggtatgtggtcatccatctttactttggatgatagatgtagttagtcaggacctctcagttttaggacttcctaccacctcatgttgttactttctagaacatccagtttctaatgcagggtttgctcttcccacagtcattttcactttttctcagggtaactgatcagggctgcttatttgctgaatcccaaatgggtttctttccaagggactatctcccactatgagtctttgtctaggagaaaggaaatgtgccaaccacaagccaacttcaatgtgatgacaaatgcctctgttacttatttaagaatggaactcatctttttccattcccttccttggttccttcttccctacacccctctctttctcttgatatttggtatgaaacccagggcctggtacatgcctggcaagcactctgacaccaaactactctctagcacattcagttcttatttaagaaatgaatctcagcaagtagtatccccagcttccctgcatagaggcagcattactgacctatttgtagcttttcagtaagtctgggccatgcaattttggttaattttgtctgttccagtttgcttttctcttgctgtgggaaaatattctgactgaaagcaacttggagaagaaagggttcatttcttctatcctggcttgttttatgtcaacttgacacaaggtacaatcatcagagaggggggtggagcctcaattgagggaatgtttccataagatcatggctataggcaagcctgtggtgcaatttcttaaatcagtgattgatatgggagggctcagcccattgtgattgggatcacctctccactggtggttctgggctctataagaaagcagaatgaacaacccatgaggaacaagccagtaagcagcagcccgccatagtctctgcatcagattcttcctccaggttcctaccctgacttccttcaatggtgaatagtaatatggaagtgtaaaccaaataaaccctttcctccccatcttgctttttgtcctggtgtttcatcaaagcaatgataatcattacaaagacgttctcttacatttccaggtaacagtcaagcactgagggaaatcatcaggaatgcaagcagaacgtaggacataagtgatggagggatattatttattggctcactcacctagcttccctttagagccttagaccacttaccttagctaggtacttactgtgccacccacagtcagctgggaactctcacataaatcatgaatcaaggcaatatgatctgggcaacatctcagctgagtctgctccctcagatgactgtaggctgtgtcaagttgacagctgaagctgttaaagacaccatctaaatacatctgcacagaaggtagggagagaatgcacacatcaccatgtttcactgtaaatataaaattgacttgggcatcagccccctctgcataggatttttaaaaacaatagaaacttgaatgctcacatatattaatcttttatttgactggttttgtgttgtttatattggctgtgtaattgaagatggaaaggggtgagtttggggctgactcaaagagtcccatctgagtcaccctgggatgagtgagacaagttgctagcctcaagtatcttattatctcatggaaaacaaacatacccaaccgtgattcacgtctaagtgtgagaggtattaaatagaagaaagaagtgctgtaagagcctgaggccaaaaggagagaattgtcaccgagaagaaaactattatgagtcactctctcaaactttatacaagtttctagaatttacaactttcttattgcaagcaacccaactgagctagctgttggagttatgtgtccatggatatataccccctcaccccagcaggaaagaaaattcctatgtatagtattggagcattggtcttcggcagtggccacagagcttctatgtcctcatgctggctggatggcaagtctcagagagcaactgtgatcccttctggatatcagtggaactgactcctgcaggcttctggcttaggaaatttaatttagatcactcatcgagaggcatttcaagcttgaatcccacacagaagcaccatggcaagcaaaggtattacagccactgcatcaagaattccaggttctgacctctacagtatcagtgagcatcctgaaacagacagtaactgatgttcttgcaataggacatttacagatgttttcctgctgtaaaaaatttccccagtcttcatcttttctaccataaagagatagatcttttatagagcaaccacaaaaacatttattacatttgaatttttcaaacattttgtgtgatgttattatgcatttaaattgtaggtacatcttacaaaacactttggtccttcttcttctcctgatggtgcagaaatttattaagtcactttctgtgtgtgaactgagttgcagaaagattaagtaatatggcttagtaactttatattgagtaattaagctagagctcagggctcacttaacttgttggcattttgccagcaaggcctgtgtgtaggtgataaacccttgtggctggcaccagggctaccagaattgcctgatttttaccttgtgggaacactcccttgaataactgtctgctacattgaaattgtcaggactgtattttctactctatggctccatttctggtttcttgtagagaataaagcatctaaagcaggaattatggaataatagaggaggagaagctagtgacttgtgtaaaatttctccataatttttgttgagtcagagcctctctctgtagcctaggctagtcttgaactcacgaggtagctcaggctgtcatcaatctcatgccatctcacgatagtcctcctgacttagtctcctaagtgctggtatcatggacttgaacccccatgtccaggtgtttgtatggctttgacatgtgttaatcttttcaaagcaccttcctctgaaaatagtgtcatccacaagctgagtttaaactcactaatgatggaactgggaagatggctcaatccagagagtgcctgacacataagcctggagatccgagctgacatctccaggactcacactgaaagctggtcatggcagtgtgtgactgtaacaccatactgggtggagctaaaacaagaggcttcctgtatctcagagagcagcaagtctagctagtcagtgagcttcagattcatcaagatactctctcttgaagaaataaggtagagggtgatcagaaaacacacccagtattgaccactggcctccatattgcacctgcacacatacttaggcacacatgcacaggtacatgaacatacggatgtatataaaccacatggacacgtattactggaagctggagaaggggcttagtggttaagcggggtcgctgctattgcagtggatccaggttcaatccctagcacccacatggcagctcataaccacctgtttcagggagttgatgctctcttctggcctccatgtgctcctgagtgtatacacacattgcacaaaaactcatacaggcaaacacacatacaaataagcaaattagatttacaaaatagtatgttatttacttgtcttactgttatgaaaaaaaaacctgacaaaagcaacataatgaagaaaggtttatgttggcttatgattgctggcagtgacactatggcaggcaggacagaaagcaaatgatcattatgcccacagtcaggaagatgagtgatgaacagttctgttaagttcactttcccctttttgtatggtctgtgcctgcagcaaatggaatgacattgctcatgtttagattggcccttcctacctcaatacatcagatctaaatactcattcacatacatacccagacataggtttccataatgattctgttttttccacaccaacttcattgtaaaacacaatttgaataaaatttcacattaatttcctatagaagaaaaaagaatgctaaattcagagaactaacttctgaggcctgatacagtttctctgatggttctattgtggtcaaactattggattacagttcatgcaaaaggtattgaacagatgccagaaattgtactgggtgcttttggtgaccttctaaattagaaggagatacacatacattataatgcaagtaattgtaggcataaagagaaattaaagcttcttcagaagtaaatatcaagcaacaaggttaacatagggactggtatgatcagaaagcacaaagataaataggagctattcaggaaaaatggagaacatacacagtcctgggcttctgttaatatattctacgcaagggggcagcatattttgaagctcctgtgccccatggtatatttgagaacttggaaggaaaagatcagtgtgaagggtgcgggagaggcataccacacatggccttttagttgctttgtttttgtatagaggcataataagtcattggaagccatatgggctatgacagcagctgtttttctcatggcatgtgtgtttgtggagctcagctggatgcttcttgtgttctgtatgtctgctgcaccactgtaccacttggttgcattcacttctggactcagggagagtctgtgatctcattttagtgatggaaatagctggaacctgactgtttctacatgttctctatggctctttctacattctctctcaagtcagcaatccaccaggaacttcttagaggtttggtagatcccaccaggtataaagcaatggtgccagaatagttccaaaacctataatttgtgtgtagagctgagtcagggggccagctcaagttgatgataagatatatccatatcttctgcaaccattgtatcatgtttatagacagagagaatgtccctgtaaatgactctggacttgggatttatatcataacatacctgaaatgtttattatagtcctgtctacaacatggtaaattgaataatatcattaccatattgttgttaagttaggtgtcacaaagctattaagttcagacatcagcagaagtctaatttactgactgtcagtcatcacttcttcatcttttcaatggtgatacctgtgatacctgtgagaatagacaggaagtgttagaattgcaacatttcaagccattttgcataagttttaggcataattttccatgtttgggaaatctcattattggttcacactgtgacaaagttcagaaaataagtttataatttatcaacaatgtagtttatcagcctgacccagctaaatccattcactgaagttttcctatgctgacactatggaagtatcatcagtcaaatgaagaaacattgtcagtgactttagactcttttcctttagccagcaccctgtcaattttcagtttctttctggaaatctcagagatatttctcatagtgctgcataaataactctctatactaccatcaatgttcacagcttttcttctcccatatttttagtggttattttcttccagaaccctactgcatctcaaacgcattctctgtccagcagggaacaggaggttgtctctcttttcttccatgtttcactctgagacattgtttcctgcactactcaaagtcctatagtttaggagttacagttgaatcatgcaagtctcatagaagacgaggcctaccctctgcagataagttagaatgatattactagaaagcaagtggtattcagaaatttttctttccatctattaaccaaggctttgatattaatttgagtgtttctgacctcagattaacttaggatgaaaaagtctcttttaccagaagacattggggagctacctgggaggagtttgccagatatggttctctctctctctctctctctctctctctctctctctctctctctctctctctgtgtgtgtgtgtgtgtttgtgtgtgtgtgtatgtgtgtgaccttagaggtacaatgagatttaggatttaatgtgttttgttttgtcttctatatagcatcattatttgatggttgattttatgtatcattttgattacactaaaagttaacctcatggatggcaaacatattttatttctctctcccctttctttcatgtatatgtgttctgtttctctcaaaaccatagcaaattaatataaatagtattctctgtggaaatcaaacagtttttatattccaatctcatggattttatcacaatattgtggtaatcatgatttccccatggatcaagaaagacaatattacagaaagaaatggccagaattatccatgctatcaagctgtgttagttgagcaatcacttgttaaatcaacattttgtacattcaagctgtttcagagttctaaaagacataggcactgggtctggtaagatggcttagtggataaaggcagttctgctaagcctgaaagactggattctatcctgagaattcctttgatggatgtcctctcatttccacgtgttcatacttgcacatgcatgaacccatgaacacacacatgaacacacagaattttaagactgtagctttaaaagtaaaatatctgggatgcagatatttttaggaagactattgtgagatatttccatagtcatagggaaaatgtgccaaaatggaacccagtgagacaacaaatgtagtttgaaaataccctagtgtgttcatataagattttatgtatgattaagactaaatccgactccctactattagctgatttgagcgtccaggtggtagaatgcttcgggacaaccacaggaaatattggggtaaagaatcatgctttccaattattgaggaagttcataaatgaaaagtcattttaaaacagaaagaggtttccccagaaattaaatttcctgaaactcaagtgttcttctatttctcaagctagaaggcagcttttgctactccaaaggttgttgaaataaatagtaagaaagaaggtattatgctgaaagaggggctgatgacaacgatggctttgtttggatgagtcatagatgaactaccacaaaggtttagttttagagggattgtagatagtcgattgtgaatatttctgtgtgctaacctcctccacaaaaatgcatgaggaaatttactttattgcttctcataattccctgggtggactgtaaccaccggtcagtgttttacccaacatgctgtagcctaggccaggcacactggggatatacaagatagtaccacatcctccagggtctctcttacttccctttggtcaccagtaggctaagataagcttactggcagctctgtggcaggcttcaaagacaagattagaagccatggccttgttaagcctcaggctagcacatcatcttgacctcttccgtttgacttaagcaagccatcagcttagccctgattcaagaggaaaggaattttccttcacctgctttgtgagatgtgacaaaccatttgaaatcattcctaattcatctaagaaacaccgatctatttgtccatttaagtcaagatgtagttactacatttctacctcatcaccagagatggaagaagtaaactcttccccccctttcagctctgttactgatgaattttgcaatcttagtcatgtttatctccatgacttagttttaccatttgaactgaaaataatgcaagttgtttctctatgttctgcctcttatgtggaacatagatttaatctccctccccaccctcacccacacacaccttgaaagcaggaagagggctattgaactgtttagggaaggatggggaacagcagcaggaggaaggggaagcaacagttgatgatatgatgacaaatgggagcaagatacaatgatatgcatgtattaaaatgtcacaaagaaactgttgatggaagtttccatgttcagtccacctgttcccaaataataggcaactacttcccaaataactgactctgggacttaatataaattataaatgctcaacgaatagctcaggcttgttactacataactcttacatttaaattaacccatattacttatctaggctttgccatgtggctcaggcttgttatctcattttctaagtatcctgcatcctcagcagctggctaggtccccccaactctgcccttcttcccattattttcctagtttggttgtccatgtataattcctgcctggctaccagccaatcagcttttttttaaatcaacgatgggagcagcatatttttaccgtgtacaggattatttcacagcaagaaacccattgttttgtatgtttctaaataaatgtatcagataataaaaatgaaaatagtacttgattttcatgaaagtttgtcctttactttccacagctttgattttactatagtaaattacttgcaatgaagtaacactgttgtataacaaagttgtcatataacagctcccaagttagttgttataactatttggaaaagtgaagtcaatggaattaccacttgcccattcaggtacttaaaggcagattctgttttatcaacaaaagattaaattatcttataatattttttttctaaaatcagacaaaagttccttccttgattttgttttgcttaagtcagggtctcacaatttaacccagagtgtctttgaatgcttgacctgccctccttatgttctgagtgctggattttcaggcatgtattatcatactcatctcattttattgtatgcatgtgatatgtgtaggcatgttaacctctctctctctctctctctctctctctctctctctctctctctctctctctgtgtgtgtgtgtgtgtgtgtgtgtgtgtgtgtgtgtgtgtgtgtgtgtgtgtgtgtacatgtccatgtaccacttgtagtgttcaggggagaatgttaaatatcttcctcagtggctgttcatcattttttcccttgaaacagcaactcttgctgaacctggatctccctgtttcttgtttttcagtgaggctggtgaccagctggacctagtaatcctccatgtgtctgctccactacctccagtgctggggtgcagacccatgtagtcatacctagtttttatgtgggtgatggggatacaaagtcagggcatcacctgcctggcaagcactttacccactcagccatttttccatttgaatgtatttgaaaatattttttctggcaatgtgaattatataaatctataaaatacagttttcttttgttgttgttagacaaggtcttactatgtagccctggctggactggaactcactatgtagatcaggctcacctcagaatcacagagatccagttgctcttaagttcttaagaattaaaggtgtgcaccaacaaacctggctaaatcacagttttctagtccttgttctaattctaatctagatattatggtagaactttataattgtccacttcctcagtttgttgggtttcatttgagttttccttgtcaaattatgtagtcattaaatcagatcacttatggtttccacatttaatatacatcctacatgtccattccccattctgcggggttctcggtctcatttaaagtcagactttgggctatctttgttcttccttaccttagatgttttctgtcccttaattctcctctcaaactgtaaagctagtcacacttccccacaaagtgtatgattacttctttctcaagactcaattacactttacattcttgatcacttctctctttccatgatatttgcacactagagaaaataaaaaaaaacataatttttctgttttcaattctcaaaatgtagcattggatcttaaaagctgcacatacagtcagttttctgagtgggatttctctctgtgtgtttataacaaaagtcattcacagaagtagtaaccaaaaattcattcatgaaaaccatctgtgtatgtgttgtacatctgttgggatttcaatcacagctctggtcttcataacatcaaccccagcacttaatctaaatcattttagaatccaacaaatggagctggtccactgggcacacacctttaatctcaacactcaggaggcagaggcaggcagatccctgtgagttcaaggccaacctggtgtacaaagtgagtctcaggacagctagagttacacagagaaaccttgtcttgcaaaaccaaaatacatacatacatacatacatacacacatgtatgcgtgcatacagtactggtccaatttatgccttcatttttcttaaagattaaaaaaatcagttattaaagcctagtaaatttctagtcctcttcatggaatgcggcttgacttaggccagcttgctaatgtgaaagcaattcagtcattatagataacaagcagagggtcaagtttaaatcaaaagctaaacaagtgtgctgtgctttttattagaaagtcaataccagatactcacagttggggtatacactgtttattcacctacaaatggcccattttactacacctacattagtttggaatctcagttgtcccaaggtctaaatgaaataaggtctatagttagcaacatgcttggataacaggaagtgctgagcagatgttaatggtggctattattattattaaagtcattatgaaatatgtgctatacatgtattcaataggtataattattttatgacccttgaaattgctatttgactgaaccactcacttttcattgtatttagtaaaagttaacaggacttagaccctttgcttacctttaatttgccaaaagaattaattctactctgctaagattctcccattttttattgactacaatagggatacatatttatttctttttgtacagagtaggacaatcactggaaattcatatattatgtttccctcaggtaatgtatgctttaagtatacacaaagtcatttgcaacatgaatgacaatatttattaatagtaagtagtcacaatgtgcatgctctcaacagtgttttatgttatgagatttacagctacatcatttaatagcatttaatctcaatatttccatgaaataagcataattgttaattaggacaaacatctcaaaaggcagggatttgatgatttgactcctttaaacataaatagcaaaacaatttttaaaaaggttctttaaattaactatattgtattttgagtatggatacttattttctgcattcttatgattttgaaaaaaaataaattcacaaaagaaaactcattgctaaagaattcatttgagattaattgaaggaaataaagcaaagggcattttttcatgccagaataagagggctattaaatatattgaaagcttatttttcagaggcaggggtagaggtgcagtggtaatcctagccttgaggggatggggacaagaggattttaaactcaagccaaatacacataatgaactcaaattgaaaaaggaataaatatgaaatgagatgcttcatatttaaaagaatcaaaatgatatttgggaagaaatattcttatcaagaatccatagggactagcatgacgggtcagtaggtaaatcacttcctgccatgcctgtttgcttccgttcagtccctaggactcacatggaggaaggagaaaaacaatgcctgtaagtcatcctccggcctccacatatacatccaaacccatacctgtcacaaacatgcagacattcatgtaggcccatgcacgagtgcacgcacgcacacacacacacacacacacacacacacacacacacacacacgtataacataattttaaaaaattagtatagagagctggggatgtagctcaatgacagggaacttgcctagtgtgcatggaaccctaggtttaatccctggtaattcaaaaaaacaaaaaaaacaaaacaaaaaaagtgtttataaacgtccacacagaatgacttttcaatatgttataccttacacaaacataggggttatttattaagttatcttggatctctatggccaagcagacatacaaaagacaattttaacatcattgaagacatttttgcttagacatggtgctacaaacctgtcatccctgaactagggaagcaggagaaggaaggctgtggctgtgatgccaggcttgagttccttccaaaggcttatgccaatgtataaaagttcactgagttgtatagactttgagtatggttaatttttgatgtgtggtgtttttatttgcaggtttgtttttttaaaacagcaaacttgaaaaagaacttttaaatgaaataacaacagtgaaaatctttgactatattttctgagttcaactttccattcctcataattttattaagttctttgcccaaacatattctcaggttgatgtttagaatgtaaaacatcttctttgttcaacaaatattgaacacttgccatctgcctggcattaaggggttgaattctctatctgactccaagactgggacaattgtttgtccctaaagaaccaaagaccaaatatttcacatgtgcatgctgtgttgtctctgttgactctgctcaactctgccaaggtattgtggaaatagccatagataactcacaacgagcatgagtctaatccaatacaattggatttataaaaatcagcactgggccactagcagtagtttgctgctctgggatatagtacatatattataaccagtcacaatgcaataattgttatggcagaatcacacacagggcacattaggagtactaataaagacattgagatgttctctgagggcattgtgcctgaccttcatcttgaaagtctggagaaacccacaaaatgccatgctgaaatgtattctgttttaagaataaagactatggtctgtctgttacctaaaaaaaattctgagtatttccaaactgggtagcctggaattttagcttctcagtgaattaatcaattttccttcgtaaatgagttatgtaattcagtgtatttgaaaaatagtattttcagtcttgagttagtttttttaaatttaaattagaaacaagtttcttttacatgtcaatctcagttccctctccctcccctcctttcctgacccccactgacccccctcttccaacccctttctgctccccagggagggtgaggccctccatgggggatcttcaaagtctgtcatatcatttggagcagggcctagaccctccccagtgtgtctaggctgtgagagtatccctctatgaggagagggctcccaaatttcatttgtgtactagggataaatacagatccactaccagtgactctgtagattgtccagacctccaaattatcttcctccatcagggggtctggaacagtcctatgctggtttctcagctaccagtgtagggtccatgaacaaccccttgttcaggtcagctgtttctgtgggtttctccagcctagtcttgacccctttgctcattactctttcctctctgcaactggattccagagttcagctcaatgtttagctgtgtctgcgtctgcttccatcagctactgcataaaggcactaggatggcatataaggtagtcatcaatctcattatcggagaagggcttttttgtttgtttgtttgtttttccaagacagggtttctctgtgtagctttggagcctatcctggcactggctctggagaccaggctggcctcgaactcacagagatctgcttgcctctgactcccgaatgctgggattaaagatgtgtgccaccaatgcccggccggagaagggcttttaaggtagtttctcgactattgccaagattgttagttggggtcgaccttgtagtgtgatttcctctgcaatgaaggcaattagataaagtctttcagtgaaaaaaagtacaaattacataaagcagaaactcctcatttatttgtagtccatctcatctgctgatatattttaataaatagtgttttgcatagtgtggttcactagaatctctataaattaaggatcaggagatctggggcccatgtacaggtgactccatccaaaaggacattaaacagtgcttcttagcatgggaaatactagacaagtgtgaagccactgggaagtaagagagttagactcaatgtccagaggtcagcagaagcacaaacattctttaggtattggggagatgatgcacttatagcataagaaatgtagactcagctgggaagtggtggcacacacctttaattccaacacttgggaggcagaggcaggtggatctctgtgagttcaaggccagcctggtctacaaagcaaggtccagaacaggctccaaagctacaaagagaaaccctgtctcaaaaaaaatgaatgcacaaattaattaattaaacaagcaaataaataaataaaaagaaatgtagattccagacagcatccttcccaaaactgttttcttgccataaggactgaggtttctcctggcaattcacagtctagaatgagaaatacaaaagttccttcgttatttacacagctcttcactggaaggatgcagattgtgccaagtgccaatcagtgatgcagagaaaagttcaggctgggggacgagtgggtaggaatcacatcttaggtagaaaaaaagttacagaaccttctaggctgatgaccaccagtgtacctttcatacattttaaaagccacctgctccttgtctgtagtagcaatcagatacaatttgtttaaatgccataaaagcccctgctattttactttttatgtgggcataggaaactgtaattttcatagcaaaggtctggggcagtgtgacttttctggataagatgctggattggatgctattatgcacttgttagttggtttactaaagtgtgtgctaagtgccttacctcctggtggctatttgacagccacattggagcatcctgagctttgcttgggtaagtagactatcaaagagtttttaaaatggtggttgtaacagcctgacatagatgattctgtcaaatcaggtttggtgttacacataattccagcactcagaaggcaagaagactgccatgagctcagcatcaggcagggctacagagggagtggcagggtagctagacatggctgcatagcaagaccctgcctcataatcagataagtaagtaagtaaataaataaataaatactaaataaataaatagtaattctgtcaagtagtgacaatacttttctgttttgaagtctattgactaaaattgcctcaatgaaatatgcatgtgattccaggtcaataccaagcagaatatcacatagaatgacagtatatgagctatgaattttgaaactgaagagatgcttctggttctaggctgattggttcatccccctgatagcttgaggtgtgttacaagcatagcctgcaagacagaatctcattgccctgtgagaaaccacccatgtaggtgctcttgtatggtgtgtaaaccatacaactcttttgtgtgaccctgggtcaaaccattattcctttatcaaatttagtgtcattgcatattgctttaatttgcatgttttaagtacctgtgatatgacacactctgtgctaagtgtagtgttatacaagctaaattatatgtccctgtaattgagtgcttaccctatggcatccctttttctaagtgttttgagtttattaataatgacagcagctccatgagctaggttttgctgttttaatttttcaatgaagaaagctccttggctttaataacttgcctgtagctgtaggaaacgggggttctgggattcagaataagtttgtgtctgatcctaaaggttctgcaattagtcattagacagtaatgagttctgttaatgaatttgtatgttattgtgaggatacggatatgctaataagtctgatccacgtgcatgctctctaggcagatgcccactttgttcttggcgcctgaagaggtttgtgtaacttgtgggaattcaaagaattctaagacacggcacaggtggagcatctttgtagcaccttagaaaataagcaagaataactttgtgattttagcaactatttcaaattaccagttatcaaaggaaaaccatcaatggataaggtagtcatacttactgtgtattaaaatcatctagatagatgttaaaaatcaggcaataaatgccaggtgtggtaatgcacacctatcatcccagccttgggaagtggagacagaaagattaaggagttcaagatcaaccttgattaattattgagtttgaggctagcctgtgctacaagagaccctgtctcctgcattgagcaacataaacagatcctgaaactgatttcatatgggatgaaatatttaagaaataaaaggttatccaggtgtgctggtacacacctatcacctcagcacacagtaggcagaggcagggggatcttaagttcaaggccagtctgtgctacatacagaaattgtctcaacaaatagcaacagcaatcagatatcaggtgcaggggctgaggaaagggctcagttaataaggggcattggtacatgagcatcgaaactcatagtacccacttaaaaccccagacactgccatccacttctgtaatccccatgctgggaaggcagaaactggaggatccttagaaattgcaggtcacctaatctagatgaattggtgagctccaggttcagttagagaccccatatcaaaaaataaggaaaaagataaactcaattttgacttctggtctttgcacagacagacacacacacacacacacacacacacacacacacacacacacacacacacacacacatgtatgcacacccccacattcaaacacacacacaaacattgcactcccacacaaagggtatcaaatcagatacaaagcctcaaatgttgtatgtattctacttgtaattacttgtatgaaaaaactacatcatcacattccaggaacagagaacaagatagtagttgctagagtttaaaagaaggaaggaatgggactattgcttaaccactgctattgaactacataattagaaatattgaagatagtcaactttaattatatatattttataatagttttcaaaaatgcattaactttttgaaacctaccccattaatgtttgagttaaaccctctaatggcaaagatttggaaaaataaactgaggaacttgtataagaatctgcagagggctaaggagatggctcaatggctaaagcacttgccatacaggcatggggacctgatttctgtcccctagaatccacataaagctggcatggtgcagtaatcccatagctcctacaatgagatggcaggcagagaaaaaaaaatccccagcagctagccgagtgatggcagtggctaactacaaaaaagaaatcctgtcacaaacaaggcagaaggtcaggaccagtactgagattgtcctcatttctttataggcaaaaacacaagaaaaatctgtgaatgtggcaccagggagatggctcagccataaagtcttgctatacatgaatgcttctgaattgcattcccagtagccatgtaaacaagctaggtgctgtttctgtgatcccagccatggggagctgaagacgggtagattcatgggacacactggcaagcctgtctagcctaatccttagggacaagattcagcaagaggctctgtctcaaaaaaaaaaaaaaagatgtataaccaactggctcgctctttcatgtgaaagatgctctgcacacacccacacccaccctacttcgaatccccactactgctcagttgattgtagctctttgtgtagggtcgaggcctcataggctttcctgtctctacttcagtatgtctattgtcatttcccttgttcaaactcatgcttagactattatgttggtgagatcttatgggtgtagcttctgacattcctagaagacacaatctcacagcaaactccctgattctcttacctttacagtattcctatcacctcttctgcaatgttccctgagccttaggtataggaggttgtggggttttttgttgttgttgtttatttgtttgttttttcagatgtgtctcttgggactgggctccacaactctgcattttgattggttgtggttttctgtaatggtctccatctgtggcaaatagaaccatctcttaatgaggggtgaagactacacttagctataaggacaaatatgtagaatgtaatttaagggattatgtaaattatagtctcaaaaaattaaagaaataactttaaaaataagattggaagtacgcaacattaacccttgacctccacgtgcatgagcacatatacagatgcacccatgtagacacacatgatcatatacacacgtaaacatatacccagaaggctgtagaattaaattacattaaaatcaagtctgagagcttctagttacatgtatcatcattttagaaggtggtttcatgagagtagttttaggattgtcattttttttcaaataacttgatgattatgtagagtgcttttaatgttaatgcaatacatttatattcttttagattgtttcatagcagctgtctagagattgcttgatccagtattattatttctgcattagagattaaaaccactgaattttggtgaattagaatgatttgcctcttcaccgcacacatatggcctattgttagtaacagaatggaaagtgcttaactacagggactataccaattttaaataagtgttgtggatttctgtttctttttagtcatttaaaatttcacgaactcttatatcatgattatgattgatgtggaagggctcagcctcctatgggcagtatggaccctgggcttcagatggtcctgaattgtttaagaaagcaagttgaagccgggtgttggtggtgcgtgcctttaatcccagccctcaggaggcagaggcaggtggatttctgtgagttcaaggccagcctggtctacagagcgagtgccaggataggctccaaagctacacagagaaaccctgcctcaaaccccccccccaaaaaaaaggaaaaagaaaaagaaaaaggaaaagaaagcaagttgagcaagccagtgaacagactccttcctggtctctacgtcagttcttaaaggcaggtccctttcttgcattcctgctctggcttcacttgaacatggattttaacctgtaaatcaaatgaacccctctcttctcaagttgattttggtcatagtatctattaaagaagcaataagcaaactcaggcagtgactgtctctggatgggattgtctagggaagataacatgaagcaacagggttctgagcctgaccaaatgttgctctcctcttttgggtgcacaaaagcagaggatcagtcgactacaagggtcccttgtgtacaaggacaatacagagtactccctacttctgaagcataaaacaccttcaaattgtattgagataaacaatgcgtgtaattaaatctcactgcaaaagaagaattgagactcagataagagaggtaggggagggagaaagaaaggaatgaaatatttaataaaatagatattttcatcagctttttatggtataaggtctacatcttagtctagcctcaaactctacatatagctagagataaatttcaacttgtagttctcgtgcctccttctcatgaatgctgaagttatgggcatgaaccaccattgcccagtttgggtagtactggggaccatatctatggccatgcatacgctaggaaagcactctgccaatgcagctacacatttaacatattagcacttgagtttagtctgagatccagtagaattgtgtttaattgttgaaattcttttttaagttttatttatttattgtgtatacagtgttctgcctgcatgtatgccagcaagccagaagagggaatagatctcattatggatggttgtgagccaccatgtggttgctggaaattgaactcaggacctctggaagagcagtcggtgctcttaaccactgagccatctctccagtcccaatatttgaaattcttaaataatgtatctaagtgtttgtgtgatgattgattttaaatgtgtccctttgctacaacatagagtcaccaagtcttgaaatgaggaatttcatagaaccaggtggcctgtgggcaggtctgtaggggattgttctggttattgaggtaggaagacccacctgcatgtgtccatggtggtgctcccacgggctgggctctgagtatttttaagagtgaaggaagctaggtgaacatcatcagcaagcaaggatttcttctttctctgctctcgaggtagatgtgatgcttcaagttcttttctagattgaatcatgggctgttcctacaataagagactgcatcctggcatttgaagccaaataagctacttacttcctccattaagtagcttttggtcaggacattctgtcacagcagcagacccaaaattagaacaggatgtgcatgtgatacactgaggttgatgtttactacgagtcactcactgttacaaattccatgcctaccataatcctatgtgatgggtgtaatcccatcccatttggaaaagtagctaaggtctaaataagttaatttgctgaagacataagttcaatgtggttccttttgattctaaagcccatgtttacgctgtataccattatccaatataaagaatttaaactttaccatatcaccacatgggcttgctttgtctgaagtactttcatctacaaaatccatcaacttctcataacctagtaagataagagcagctattaaagggttaggaccgttgtctgacaaagtctgcatcatcagtaaaagtgagtaagttctcagtggtgtgcagaacagattggactgagctgtggggaaagggggtcaggaagtgagagcagctgtgtggctctcacataacacaccaaaacaggactaatgccacgctcatctggatgagggagaagtacacccgaagcagccaggtatggtggtgcatatctgtaattccagccactgggaagttgaggcaagagaccaatgtcaaataatgaaaaatgggaggggggtatgtctggcgtgggaaattttttgtgaggttactaagaggaatgtctagataactgtattgttaaaaaaaaaaaaaggactcagtatttttggtttaaaactttttcatatactatactttgatcttactcttctccatcaccttcttccagatccttcccacctccttactctttccccttttactgaaaatagcttcttttctcacacaatatatcctgattacagttttcccttcctctactcctccccgcctcccctcccatctggattcacacctttctatttctcattagaaaagaacaggttttaagagatggttataaaatataaaaaatataataaaataaaacaaaaattatcacatcaaagttgggcaaggcaaacagaagaaaaagagcccaagagaaggcacaagagtcagaaactctctcatttacgtactcaggagtcccataacaacactaaactggaagccgtagtagatatgcagaggacctggtgtagacctgtgcaggctctgtgtaggctacttcagtctttgtgagttcatatagctttgctcagactgatttagagggccttgttttcttcccctccccctacttaatcttttaatatttcactacacaaattgatttatctggtaagtcagagatttcttctttaattctgtaggaaggcacaggcatataaataatacttgtctattgtgggaaattaccaatacggagtcaggtagaaatataagggtatttaatagggaaaagccttacttacagagcgacctagccagccggcgtggcggcagtaggtgtggctacagcttcccctacacttgtctatattggcagcattagttttggttcataattgatttactatgacagaatcaaaaggctacaattatccaactgctaagataatagcataagataataatatagttaataataatattaactaagataataatatagttatatactactacatagctatataatatactattaatatataacacagtaatataattagtatattattttaatgtaaacattaatatattaatataataatataattttatatgcattgttctaaatcagaggcattttcaaacttccatggagagattttgattcataaatacattgtttaatctaatattatttggtagtcatgtaggtaggcagatagatacatccttactttttagacaggatctcatatagcccaggatggccttggattaatgattgtcctgcctctgcctctgccttttcagggcttagattacaagcacattccacagtgcccagatctttatatttgcaaatgatgctagtggtctgggatgtaattccaactcttgctgagacaaaaggattcgaaattcaagactaacctgacttagggtgagagcaggaatgggtagagattcttgtactctggctccatccccaaccgcaatgcaaaacaacaacaataataaacaaacaacataaacatttgttatactacaaccattagtaggttttaaaacttgcttaaaaaatattattgaccaaaagaaatcttaagttttttttctaatgatttctcctttcaacctcaaggagtctccattcctgtctcacaacccacgtccagtctatgcagtttctactttcaaaatgtagcacagagtctgatgactcctcacaactaccatggccccagcctccaccacctgccatccctcaaactggctttgtggtctcccagtttctatctaagctccttcagagcatattctctatagagctgtttggagggtttcttcagtatataagtaaggtaacctcaaagggctgcaggggccccagattttactcatatcaaatctttacagtggttcacaggaatgtgtgtgacattctcacctatacttctttatccactgctattctactttccatgaacacacacacacacacacacacacacacactcacacacacacacacacacacacacacacacaggaatatgcaaggatgtatactactagccagtaaaataatgacaatatcccatgtcagatagccttaggtaatttcgttgtttgtatatgatgggataagagttaaaaaggcaaattacaacttaaaatcattatgaaactaggtttagctttgaaggccaccatgaaaaagtttgaaagaatgctttggccctatcttaggaaccacttctatataaataattgttgttcaatattgtgtaattagtattctatatctgttccttcatggttctaatgtaattatttgtacttagctcttcattattaacttctatagagttgattgtcacaaataaaatcccaatgactaattaggtttattggacatctattgttgtaggtttcccagactctgcaaaaatctaatgtcaaagtaaacaatagcttacaataggaacctaaagagatacagtagccaaaagtagtgtactgacattaactgggtcttctctgaaaagaaaattaaaaacaacatttgaaatctattttattttaattatgcatatatacatgcgtctctgtgagggtgtgtgtgagaatgagtgccatgctcacagaggccagaagggagtcattgacaccctggagctgtagttaccggtggttgtgaaccacctgacgtgggtgctggaaaccaaattatggccctctccaagaatgattcttatctatgagccatctctcctgtccctggggaaaaactgattaatagactctggagagattgctcaggggtcaagtgtactgactgttcttccagaggatccaagttcaattcccagcacccaatacatgcatgtacttagcgcacagatatgcctacaggagaaatgcccatatacataagataaaagcaaatctttaaaaaaaacccaattaatgcatcaggcaaatgaatggaattagaagaaaccattctgagcgaggtaacccagtcacaaaaagacaaatatagtatgtactcactcatctgtggattttagacatagagtaaaggattacagcctacaatccacactgccagagaaactagtaaacaaggaggaccttaagagagacatacatggtcccctggagaaggggaaagggacaagacctcctgagcaaattgggagcatggggggaggggagagggaactaggagaatgagaagaggaggggtgaggaggacatgagggagcaggaaggttgagttgggggaagaatggaggaaagcaagataatagatactataatacagggagacattataggtttaaagagaaatcaggcactagggaaatgtctggagatctacaaagatgacaccaactaacaatctaagcaacagaggagaggctaccttaaatgccctcccctgataatgagattgatgactgatttatatgccatcctagagccttcatccagaagctggtggatgaagcagacacccacaaataatcactgaattgaattggaatccagttgcagagaaggagggctaatgagcaaaggagtcccgaacaggctggtgaaacccacagaaacagctgacctgaacaagggggagctcttggtccacagactgatatctgggataccagcatgggactgatccagaccccaggaacctgggtgtcagtgaggaggcctcagaaatcacggggcctcctgtagtagatcagtacttatccctagcataggtgagaactttgggagcccatcccacatggaaggatactccctgagcctagacacagggcatgggcctaggccctatcccaaaggatatgacagactctgaagaccccctatggaaggcctcaccctccctggggagcagaaagggcatgggataggtagggtgttagttgaggggtcaggggaggaaggggagggagagggaactaggattgacatgtaaaataacctttctaattcaaataaaaaatctttaaaaatgccaattaaaaagatattcttagacaatatataatatttgtgatattgttgagttgattttattctgtatagtaatgatgtcaaggttatttaggaagcctcctacccccttttattttcttttgatttgtttgagacggtgaaattttcgcccaggctggcttcaaactcacgatcctcctgccttcacttttacgagatatctgctgaattatgagtgaagagagttagaatctgaaacacaacctcaagtatttatggagctatatctatctgtagcttactatgcaaatacatatagaaatagaaaataatagtataagaatggtatatgcaaacaagtgattctagtattggtaatacaggccattcttaactgattcttctttttcttttctttttttctttttttctttttttttttttttggtttttcgagacagggtttctctgtgtagctttggagcctatcctggccctcactctggagaccaggctggcctcaaactcacagagatccgcctgcctctgcctcccgagtgctgggattaaaggcgtgcgccaccaatgcccggctctgattcctcctttcaatttggttgatatttttcaaaataaaatgttggaagataactgaattcaatcaaatggcattaaaatgagtaattatttctaaatcattatctagaggaataatgagctgggatgttttgttgttaattttgatttttggaggtaagatctcactggagatctgaatggcctggtgcttactttacagatcagggtagctcaagcttacggtgatcctcttgccttagcatctggatgttaggtgactgcatgtgtcaccacatccagctggcaaagcattattctgaatagcatttttttgggtaccctccctgtaaatgacatatttcagtgagctattgataagctccacattcatctaaatgggcacttttatgtttttatttcttctgatgttgcgtgatgtgaccttagacaacctctcaaggtcagtcacagttatctggagaacagatgactataatgggctagtgataaggttgtagtaaaaatgaaatttatgttatctataaaaccctaccccagtgcctggcaaataaaaagcattcaaatctcatcttctatcatctgtcattacagattccaagtctctgcttcattcaatgagaaaaacaaatagaaaagcaccacactcaatcacctctttatattgcattgaaattcggtctcttactccatgcctagtgcaagtccttaggaaccatttgaacacatctgtaagaattacttgcaattaacatgcaaattgttataatacattattttaaccataaaatattcttctccagtgtttaacattctgcctggaagattgttctaataatgctttgccttcagtgtttcaaacccgaaagccctgtcttgaattaccatttatcaaaattattggaatctaaattgatgtcttttgatgcatttgagaaacttcaactcatctattttctgggtggaattttaaactgactatctcagttgtttggagtttggagttcacattacaggaagacagataattcttagagaacagattagatacatgagagaacttatctgatatttaaagaacaatagatctttgaattttaaagaacagggtgttttcagagtaactaatgaacagggaatcactttttttttctgtttttccattttaagtccataagtgaatcagatgttcctgaccatttcttatattttttcatgcttgagtatggtatgtgtgtgtgtgtgtgtgtgtgtgtgtgtgtgtgtgtgtgtgtgtgtgtgtgtgtgtgtgtgtgtgtgtgtgtgcgtgtgtgtgcacacactcttggaaggtagagaaagcttcaagtgtccacctcactcctttgaggcagggtctctccttgaacctggagctcatgccagctaagctgtcagcaaggcatagcagttattctttctcttgtccctgcagtggtgttgggatacagatgtaggtgctgggatctgaattctggaccttagacgtacatagcaagtgtttataccggctgaagcatctgtctattcccattgttcatttcttaatgtttcttcttataagggattcttcactggtaataataaatgctgcacaattgttttgtgctgggaataataccagagcctcgtgattgttagataagtgctctatcactgagctaaacctatggccccagcccaatggtttgaaacatttaaaattataaaacataataaattaaaatttccctcctaactccaaagatttttggtttcatttaatgccttgcacagttaaggaaataactacttttctcatgtataatagctctcatgaaaatatagcatgctctccatagagtatatatttaaatacaagttgtcataaagaagtagcaggagtttttaagacagcatccaattgcaaagctcagctgtagtgtgtattttccacaaatactcaatgtggcagaaacactaattaatctaatgtctcggagttgaaattgagtttatcacaacaacaaggaaggggtgtgtttttcaacctgcagaacccacagaaccagctttctcttagctgagctctggttctcaatctttctaatgctgtgacctcttaatacaattcctcatgtttcggtgacttccaaccataaaatcattttgttgctacttcaagaactgtaattttgccatgattatgaatcataatgtaaatatttgatatgcaggatatctgatatgtgaccccccaaaaaacccagaccattgagaaccattgctctattgtcttctgtcccttccagctgttgaaactgattgccttctggaaatgaaaaccctacctggctcagaccggggcagtaagtctggcagaacaggtggtcctgggtgaattgctatgcctctgcataagccctggaaattcatcaatatgctttgccttaagtagtgtgaattggagtgacaaattaacagcagagtgttcatgcttgtttcaaagctgtaagctaaggcttctttcattgcattacagtcatcaacctgaaattatgctgtaaatcaggtatcagacacacgaacgtacataccctcatttgtagtctttattcaagcactgaaacctgagaaaatgggattttagtcctaaaccccatctggcattttcattagactttcaggagttataccataatgagtcttagtttacaatttattagtacacatataaatgaagttttgggcttgatggggaggtgcatgtcagcaaggctagcatttgggaggctgaggcagatagattgccatgagttcaaggccaggctgaaatacagtgtgaaaccctgcctcagaacactgagcaaatacataaaaaaacattaaatttttcagtttgtattttgacatcatgcagtaatttcacttgctgtttgtttcaagggaaggaatgagaactgagtgagatgaagggaactgacatttgcatcatagccacgagagtcttagttttagcctgtctaatctgaatatatcttctcagagtgaaacccttttataatcaaggggatttctcaaattacagagtttattgaagtcctcagaggctagtcagaaaaccagaggaccaagttgtgggactgtttcctgcaatgacctggagcagggctatatagcagttcaaaatgctgtggggcagggccagagtttagagaactttctgttaattttctagaaggaatttgcattgactgtgctgaaagggtagggtagatcagagcttggatgggaagggttgagagggtcatctacaaggacgagcaacagtgcagcacagactggtttagttcagctaatagtctgccaagtttacataggaacaggatttggtcctgaggagatttaaagttttaactaggtcctccccaaaatgatgtgacagactttgatgatcccacatggaagacctcaccctccctaggtagtggattggggggtgggatgggggatcagtggggaagataggagggagagggaactgggattaatatgtaaaataagattgtttctaaattaaattttaaaaaagatgtcaaaatatagttattccaatgtaaaatggtcttattctttgggtataaagctgcctcgactccttgcattccaggtctccttttcctatcccctagccttttgtcacaaagtgtcaataaaagaaacacctccaaccttgaaggaacaaaagaaatggtttattctggggccaaatatgagtgactatggcccaagaatacagatttgggttttccacataccatgttctcatgagttggcaattttgttatttttgttgctgggtacatcaggtagatggatgataacaaaacaggagaaattgctgtaggcttcagatactatctgacagcatttttagtccttcagttggtagaaactaggttcagttctgccatcccacaggatttaactaacagtcacaaagatgttggatcacgtacagaggatgggagttatgctaaagatgccctaagataatttggctctgaacttgtaacattttaacctttcacatcactcagttgttcaggctttgtagtcacagctgctttccaggaattttcattcatgcagattagaacatatcagaactcttctcttaccactgtcttatgaagcagtcacagtcagtgcctccataatataacaataagtactgctgagccaacaaattatgaactgcactgacaccatatacagttcttatgtttaatatgttttcattctagtgataaacacatgctatcaagaacagatgttatttaattacagttataataagagcacaaaggggctgactgtctcttagaagcaagagtctatctagtatgccctaggttaaactgaccaagactttgccctaaagagaaccaaaaagaatcatgatagaatttgacttactagctagtggtgggagtgaggacagcagttattggatgaatactttcaggtcccagtgaatcatcaattaaaatatcttaaaggttgggtaggaaatagaacagagaaaatggtgtacataggagagcctgggaaaaggagtggaactgggtgcaatctggtcagatgagactgaagagagggagagagcggttgtctccctatcatggctgaggcccccaaagccacataagtaaatagaagtgtgggttgacttgaagtgttggaatactaagctcctatttgcaacatactctggctagttttatgtcaacttgaatagtagttctaccaaagcttaactaaccttggaggaagtgtatacccagtcccgaagtgcttgatatggaaaagtggaagttcttagcaatacagaacacctaacactgtcaacaacacttctgtataactgagactccccatgtacactggaggtaagaggcagcaagactcagtcagcacctgttcttaattcattttattctttcagaaatttacatatgcatataatatattttgattaaatctgtatttcaattcctcctctcaaattcctccctctggtggttgaggatggcccccatagacccatataattgaattcttcgtcctggttctatcagaaagcacattgtgcaagccatgatgagcaagccagtaagcaggaccccttcatggcctctgcattagttcctttctccaggttcctgccacgtttgatttcctaccctgccttccttcaatgatggactacatgtggcagtataaataaataaagcctttcctccccaacttgctttgtgtcatggtgttcgtcacagccatagaaactctgattaggacacaaacctccttgctagacatcaaacacacttctatgatcccttaaattatgcaatcattatctgtagattcaggaaatgtgtttgcatttttcatacagacatatttgttatagcaagctgccatgcaggtgttcagcatcactctctgctttgttttgcagcgttccaacattccagagccttcctgatgaaatcctcagcaagctggccgatgtcctcgaggaggtaattgttttggtcctttgaacatcttgagatggaacccagatcgggaaccaggctgagttgctttctttcacagctctggtttgacaaatgcatttgacaaatgttgagagacgttgccagtttgtcccaagctctgggatgagctatagatttgactacaaattaaaagcagcttaatacacccaacattaatacacagctagacacagccatgtcagttatggggagaaaaacatttcattgtggtaaatataatgtgattgtgatgtctatgaatgactcgctggcacttttcttctttacttcaattaattgtagttgttgccatcctaggataaaaaagtttacaagaagaatgagcagttggatccatatattctaagcatgtgtgtattttgcatatattatttcatgcatgaatgtggattgccatggactttttttgagcccatggtgttgaggaagatgagagacagtggatgtgtggctcctcatgacccacagacaccctgcttagagaggaaaggaacttcttccactcacacagaagcttggcactggattgacagcatcctgttccctcgctaactgcaggagatccaactccatgttcttgcacagctgagttcccaggtgttgtagggtctttattgactatggagaaaacaatttcaggaggaaccatgtacaaaagcaaatacctataatcccagtgttcaggaggcagaagcaggaagggcagtagttcaaagtcatccttggctacatagtgctttccaggctagactggggtaaataagaccctgtctctgaaaaccataataataaaagaaagagaaagagaggagtggagatattggggtcatctttccttcttggcctgtcagccatcagtccaagaggggaaaatacagaatgggggacagaaagcgttatacatggcccataagcacagagggaaggaagtctcaggaagacagacttcagtgaatcagctcaatgttatttcagagtataaggaatatataggattggggagcctgggaacaaacccaaatttgcattaagtggcaccctcctatcacaaggcttagcatgttcagtagagtcctatagcagagatcctagcacagctcttcttagcagagatctgtgcccagggtcaagctaaagatgaatcaggcatctgatttagagacagcttttagataaggtcagtcttccaggccctggcacattcttcagataaggataggtaggaagcagaaagtcttgctgaggatggaggaattttccatatagtcaagcttagagaaagctgccaagctatggcagacttcagcctctaaccagccagcaatgtattccaacagagagcaaaggagagaaaagagaggacaatagcatatacccagagaaaggcaaggaggcatatttggcctttgggagatttggattgcatttttcaaaggctataatctatatataaatatgaaagattatgtaacatgttttgatatgcttatttttatctagatgatttctctcataaaaaagattatatggtggcttatgagtgcattatacaagtttaagaacagttgattaaataaaaacattaagtcagaagaggtcaaagaaattcttactataaacatggggaaaaaagaggtgaagacataagtttagacaataaatatgctccttatccatgtctgtgacattttctcagaaaaatacagattgatagatgaaaaaaaaaagcaaggttaaactcaaaggccacattgttttggacatggtttatcagcagctttaatactctgaagcactttgggggggaaaaagaataatctatgtgcaggcaaccctcactgtactttctgttagttgtattaaaacaattgacttccagctagcaaaaggcttcagtcatatcctgggacataatgagctctttccctttctcacatctctttaatttttctgccttcctttctatctcagttttagaggctgagatgttctctgcaggtagtagacatacatgttttgtttcaagttgtaaagataagaaatctgttccattttgttgatgaaacatagatacattggtaggaatcctggaacagtactggcagaagcaaatctgaccactaaatgagaatatcttagtttatgtaggaaatatgggggaagttggtttaaatcacttccaggaaacaagaatacattcaaaatgcctggatggatctcaggaaaattatgagtttgaagacagtttaggaatagtaaattcatggctatctaaggctacattgtcaggggaggaggatataagcaatgagttcagtaatttggaaggtgattcaagcagcccaagggaaacctgagaaacagacaacatagttaagggaaacattgtatcacaggttgtttgcttatgttttctgttattcagttaatcttcattgattatccctcataagccttgagatataacactttttaaaaaggcatggtcagttcctcatagagtttattttctagaaagagagatccctaataatcaatcagttattcaggcttttagactgagatggaagccattggattgctttaagaaaatcaatagagttatttgacttacagttttaacatggttcccatagctacaaggttgagcaaagatgggggaatattggggatgatttttaaaagaaatgatgttggctttgttgattgtcatagaagagattgataagaaacggccgatactgactgagagaaaaccagaaagtttactgttattctacattatggaagaagacaaactgaggatagctaggtgagtcagtgataatggaaatggagaagactagaggaggggtacattggaatgaagagacaaggagctgaggaaggaagcatgtggggaaatagaactcttggggccgttggcagatagatgacttggagcagtgtttggcaaggagctgggtgttattctgagggaccaaatgtgggtgaagactaggcagagtgtggaagctggtagtagcccagcattactataatagcatgtgtggctgtgtggagcataatactgaggaaaaacctcaaacaaataagcaaaaataaagaggacaaaatgtcatttatataaagtataaggatatcaaatatttgccttagtaattataaacaaaatgtcacaaatcagatacatatgagttgtttcctgtaacatgagggaggagaagagatctatgaagaaaaaaggaaaatgaatgagtgcatgcatgaatgaatgactcagaggacacagagtaaatctcttgatttttaagagttcacctctaagaaacaaagcaaattgttttgtcagaagcattttgtgccttaaaattaggaaggttcaaggaagagttcacagaacttgcatttgaattttgtttaaatgacaaagatagaaatagagaagggaaaacggagctggctggagtccaggaaatactgtgttgtgggaaatggaatgctgcacaggagggtaggctttccatacatatgtaggtgactgagttgatgcagtgtctggagctatggaaatcctgatgggatattttgtttccttggtgatacagaaaacaaggtcataaacagaatgggagttgggtagacagatgaggatggtgggagaaaatggaagtttagaaatatggtgagattaccaggtcccaacttgatgcttggaatttctcatctaaattaaatagcatagagaaagataaattaattaacttagagacaaggtcttgctttatatcccaggctgaccttgaactcattatctttctgcctcaatctccaaagtcctgggattacaggtgtgcactattaggcatgctacaagttgctttctccacttttagtctatcaatttatcaatttatcagtcaactaatctatctatctatctatctatctatctatctatctatctatccttttttcttttgaatggattcaggttccacataagtacataactggacttaaccaagactgttatgttttcaagagaagatgactgattgaaggggcaggaaaatgaggacatatgcaagaatgattggaatgtttgattctggaatttgactgagccaggccagtgagaaatcacaggataagtgggcttaagtctcatgagttgaggaatttttggagttgggttataagagtggctgaactgtataggagttaaaaatatttttgtctctaggtaaaggctgtattggagaatctgtggtccattcataaattcttagtttgagggtgattgaagtaagctgtcctatgatttattgatctctttcatgtgtgaccacaaagtgaaccagagcatggctgctcttgactgctgtgttcaaatataaaagatattcatcacaagaagacttgatgtatttctctctggatgtgctgacctgcaacctctgtaaatgtaaaactgcttttcccagtgggcctttcagcttttgcttgtctttgtggaatacagtgaagagctctctgaagatatgtgcatatgtacatgtgtgggtatacattgtagggtgtgtctgtgtttcagagaaatcaaactgaaacacaaattcatgagccccaaatcaacctctttataaagtaaaacaaagctaagagtctgtgaaatcttttaatcattctctttcttctccacagctgtgaaatatttgctgtcttatgtaactatagccatgatgctctaaggcagaccacaaaatatttcagtgttttgtgctgtattttcattttcattcttctattgtgtgtatgtgtgtacattgcatgtaccagttcttgtaggtgtatgcatacctgtccatgtgcctacgtgtactatggcagctagaaataaacatggaatgccttctttactcttcactttagtttttttttttttttttttttttgagacacagtctcccacaggactggaagcaaattaattcagttatgattgctggacactgagctccagggatcctcctgtccctacaaagccagcactaggattataggtgtgtgcagccatacctgccttttccctggggcctcagatctgaaatctagtcctcaagcttccagagcaggcactttacaactgagccatctcctcactcccagagtcacattttctaatcaaatgttttagtgtatgtttggatggagtaaccacagagcaatgtctgtcaaggacaaatacaatcagaacaggtgatttagtcctaaccatttgtttttagaatctaaacatgaagcaaatgtaccaaatacaaagtagatatataaatatgctactcagtgcagacaaaatgcttagttcaagttgaataaacaagaacaatgagaagttttattggaataaccaatcagataaaatgaaacaaatctggaagaacaaaagcaatagtatcatcacttaacatcagagacaaatgtgctctcataataattaagctttctaccaatacctagatgctgaaagaatcccaaattatttcataagaagtattattatagccaacaagtaagtttacagctttgtttattggacagatatttatggaacacctgctatgagccaggaattgctctaggctttagggaatccaggctctctttcctatagcatatgttctagtgaaggatgcagataaggaaggaaggcaaatagcatcaaatgataagcccactgaagttattgttgagagaacaacctcagtcacacatactctgtccagatgcctttcactttgataaaccctgagtccaaatttaaaatatgtatggaagcagtttaggttcaaaattaattcagcttgacattaggaagggaaagtaagattgaaaccaaggtttaatgaaagataatacggttgccccagagagagggaagcatggtcttagcatagaaattagtttactgttttaattggggagaaaaattgtgagagaggcttcagaaaatttaacaagatcatgtcatagtgggtttataattgaaatttcagatcaaaagggtagacagtaggagtcccaaaggactagcatggccacacatcccaatatcccagttagagggatggatacttgtgcaaagcagagaaaggaaatttaataatgcacatactacaagaacagataaaagggatctgatgatgttaacatcactttgtgggtactgacatggagctttagggttaagcagaaaaagagatggaccatggtgcaaaaggtgtgcttaagtaagccaaggcatggttgatcattgtcttagttctggttctgcatgatgggctaagaagtcctgatttcttaagggcaggagcaggctctcagagtattctcatgtttcagagtgtagcttctacatcacagattatggtccctatgggtgggggaggtgtgtctcaaccaagtgctgttacttcaaaatgaatacaggtttagggcaatgacctcctctggggaatctggtacaggacactgtaaaaaacaaaaacaaaaacaaaaacaaaacaaaaaactttcttttccagtagggtgtttaagttatgtctggcgcagtgagactagaggggaagcaaggtaggtgaagcacccacagttgtcaatggacattcccagagtgagtggcatcctatttgcagaggtaagcagtaggagtcatagtgggcaaaggatgcccagcaaaggcagatgtgctaggctctcctgctgttggttcttactttgctaagtgcctattgtgagcatggtgacaaggagtttgcttccactctgagcacagggagaaacaatatgcatggtaactaataaagtgatatcatgtatgtatttatttatttatttgtttgtttgtttgtttgttttgagatagagtttcttgtagctcaaggcagcttgaagcttctgattcaccacacctccacttctagagtcctggaatacacctccatgtactttggatgcagtgctggggttagcatgcatgtcctcttgcacaaaccaacatcctagctactgagttacccagtaactgggtaatgaccagttaccagtctctgggtaatgacataatcatttctttttaggatttatgagaaaaataaattataggggatcattccaattaaatggctattggcttttaatgactatgagacacattacaaagaaaagtgactgctaaacttgccaaggaacaggatggtcctttaaggttcctgctttatagaaaagtcagccagacattctggccctataggctgaagatggataccccaaccttacagaggaattttgggtgactgtccaggcagcaagatgtctctgtcaattctagagtcacttttgttcgtaatttgttatagtgggaaattaccaatacagagtcaggtagaaatataagggtatttaatagggagaagccttacttacggagtgacctagccagctggtggtagcagtctgtacagcaagaagcaaagagaaaccgaaagcgcaaatgcagtcacactacgtcactctgaccacaccctcacaagcatggtcaggcacacctgtagctagcccctaagaagttgtggctacagcttcccctacaatttgtttgtccagtttggacagaatgctgccaggcagtccaggtaagagtattcttgtccaaatggctatcattgccaaattaaaggcaatctccataacaagtttatttaatgctcatcttcctctctgatgtagttgatgctaccaggaatagatatttctcatagtcattaaaactcttaagttaacaaaccattttaaatgccagaatctgtaggtctttaaaaggttttaaagaatacctatccttctaaaatatatctctgtatatctagaaaacctacctaagtttgactattatagctacctattaatctatatttttaaattacacattacatttcaaatgagctgtataagcacagcacctaaacaagagtagaaatatacatataacaaaattgaccttaaatttttatcaataaaccaaaatctataccaatgtatttatttctatataatatctatccctttttttctttaaaaagagattgactgtgaccattaaccattggggactctgtactgttgagtctgtacctttgcctaagactgaactggacacatttgaacctgaataacgattgttctaatttgtgtcctgggtagtgcaattatttatgttttcatatattgtatatatgtgtgagtgttgcactgacaaggcccagacacagaactgctcttttctctgatttttaaaagggacataatgaggaataaaaagaggcaaaagaaaagacaaaagaaggaaaagtgaagattattcaatttaccgtggcttgatcatctgttaggaggctcccctcttattattcagtctagagactcccttggatggagggttccaatagatgcacccttcctggttgttaacttaagcttattacagatatagggttttgtgtttttactctgtgatttcttgcctggacatttttgcagagtccattgccttctctgtggctgtgaataaacacagggaagcatcctgcctttgttgattactgaaggactacaaatctttctctttttctctctcatgtttttagatttatttgtatcttattttatgcgtgtgcaagcatgtctgtttttgtaccatgtacatgaacaagccatggaggcaagaaaggaggtgggggctcatatcacctgaagctggagttagggattgttgtgaactgccatgtgcatgctgggaacccaacctggtcctctagaagagcagcaattgctcttaactgctgagccatctctccatggcttctatcattccaaacagccttgagctgttccagaaagcaactgatcaactagtcagggactttatgagttctctttgaaaactctgactatcataaataactaacattttctttctttttttaagctttggctcttgctatttgaagccaagcttgaggaagtttagagagcctgctctttctcaatgtctttggcctatagtactctgaaaagtatgatttggctgcctctgatttcttctgtattttccattttatgaagcacaccattgattttgaaatggaaagatgtagaaggtgtgtgtgtgtgtgtgtgtgtgtgtgtgtgtgtgcgcgcgtgcatgtgagtgtgtgtttgtgtgtatgcttaaaaggcccagactgaatcttttgtttgtaacaccatttcttatatagataaataaatatagaatgggagaaatgtgtaaatcattggtatgatcagggactgggtttcaaattgtagtgatgtctgtacaacatttgaatagacaaaaagccatagcattgtacaccttaaatgggtaaattttatgattggagttcatatcaagtaaaccatttaaaggatggaactttattccaattgtgataacttcagtcaaagaaagacttggtcttacttggcaagctacactaaccctgggatggttaagtgtagttcagaatgttaaagtattaacagaagtcatgttttctggaaaaacgccaaggagaggagagttttgttgggatgttgtcaatacttgtacattgacttgatgcttaaacaatagtgccatttcagcaccagtctgacgttttgtgtgattccagtctgaacaaaggtctttctggctctaagtactggttttaaataccgttagataggagagacaaactcttgactgttccttttgagagatctctactcttatgaagatttgaccctcggcttaaaaaatattttaaagcaagttctagatgctattactttttactgggtatctgtaagcagttgattaaaaacaaacaaaacccagcatgaatggtttccacactatggcattcactctgcaccaggtgaagagcacctgttcagttctaccccaggtaaatgctctcttattccattttcaatttacacatgggggactgaagctaagaaggcacagctacacaattggggagctactgtaataatctgacacttgaaacaatggcttttgagaactcatttacagtaacatcttacaaacttgtgtgatacatgaaaaagcaataaaaagggggatagttcttctgaacaactttacagaaattttttcttgaagtaatttgttttcccagtcatagttttacatgtgttatcacagggatccattttaagccttctacaagttttgacacatgtcattttgtgccattttatcactggaatatgcatgcttagccccaggctacttgtgattcattaaaaagtgtctgcacactggaagtaaaatgccaaactgcaataaatcagctttctagaaatcactctagaaagtccttgaaatcattgccagagatgagcatactagcccacttggagcttgtgatttgttgtcatttgtgtggcttgaaaattacaggtttgtgtgaaatggaaattgatggcctcactgaattcagcttgtgagatctgttcacagaggtcctttggcagtcagcacctaagcagaccaccatcaactctgagcaactcttcaagggaccagagataaacaccgataaactgccctgataaaaaacaaagtgacctaggatctttatctacttattattttttttaattggaggcctcgtgtacctttgaaaaaaagcctagctccagggtgtgtgcatagggactatccacaaatcaatgaatagaggcttaatttttctgacaaacaggagtataaagaataaaaaaaaaacattttggcttttagttttagccttaggatacaaagcctgtctattctatacagttttatcaagcagcttcttgagaagggataacccaggcctccagccccaggcctcagggacctctggctactcagtgcacttctgagtgtctgccaggggcagcatactatctccctgtggagaagaagccctgcagaggtgtaggccagagggcacaggctgctcctacagacacagttgcagcaagggtaggcagaatttcaatcagaatgttcatcagatgtcagtcagtgttaatgaggagcaaactgtgaccagaccagccgaggccttagggacagacagtgtgaaagacagaagttgcttctgtgagccttgtgttctcccaattactacaagattatataaatgagcttctcttagctctctgggaaatgagtgctactattctttttattgcttccccttcagattattgctttaatccgtgtaacctggctcgtcttgtaaatagactagtgtaacactgcctggctggttctctctactctctatgatgttatgtaaatcagtatgcaatacaatcactagggattgcagggagcagaaggctctctccaactcctcttccctactccaaagacatttctaaaaagcctgttgaatcttttatttctcttttacagaagcttagtgtgactatcgctactgcatttttttttgcccacataattcacttatgcagtttatgctgtaatgccacatgcttcctcctgctttgttttgaagttgtctggcccccggttttctgcaagcatcttaaggataggttatctctcaccgtgtatccagtttccagaagagcgaggacgtgcacagaattatgcctgacatcatcagctcattgcaaactgttgaacaaataggttttcaacaaaggtgtgctctaggactgacccagtgaatgaaacaaaaggcctctttcccattccgagggttcattccctttagaatgcacaagaagagagggaagcatgccctctaaaacccaagcgttcatctgacacacattacacggtgtgtcatagaggctactggtagagcagctccatggtccccaaagccagaggaaaacagagaggatatgggaaccagtactgaaggtcaccgggaagtaataggtctcatttttctgccctcaactttctcttccgtggatcccagggaaacacaacaggtaaacatttggaatgatatattaaagaacacaagtaccttgtgagggagactactttccagtgaaaacatctggacggggaggagtaggctactaatcatggaagagagtggggacgttgggtagccatcctcttgtatgtaggaaagaactgccaacaaaatcaggaggacttttctaatattcttttccattccacttagtttctcatccacagaatcaggatgttgtccagaatatatggctctgtgtaaattgcatattattatattccatgagtacctccttgtacagcataaacactgggatctgagtcttggtggtgctcaaccaccatgacaccattcataagtcacttggtcttataaaagttactcacattctctcagttgtaccaggctttttcttttggactaccaaccggcacccgaatcatgacacagagacttattagttttgaatgctcagcctagctcagacacatttatggctagtttttcttttaacttattctgtttctctttatctaccctttgccttgagccttattacctttcttacttctgtacatctttctttcactgcttctctatgtctttctgactggtgtctgccaggcttcttgacccaggtgttctctccttctgtcattcctctcgagcctaagtttctcctcctttttattctctctgcatgcaagctccacccatacctctcctgcctaaccattggctgcttagcttttaattagaccaattaggtaccttaggcaggcaaggtaaaacaaatgaaacacatctttacataattaaacacacatccttacattgttaaacaaatacagcataaacaaaagtgacacaccttttcacagttaaagtaatattctgcagcataaacaaatgtaacacatctttgcctagttaaaatagtattccacaacacccagtcacacctggctcttctagaatgcagtgataacaacagtacctacttcttggaactgtttttaatctttttaagcaaaaattttcctctgttaagatacttcattttttattaaagagtagcttcagtttaatagaaaaattgaacaaggtgtagggaatttcaatattccttctctatagataatttccctgctaacatacagtatttggtaaggtacctttactataattgatgggccaatattgaagtattaacataagtccattgtttacattagagctccttctatgaattatttacctctgtagatttctaccaagcatattgtgtgcccaccatcaatgtagtataaaaccccacttctctctatcctgccatcctttcttctctcttagcaatgttactgaagtaaacactttctaatttcaaattctacgcattcatgttatcttagaatttttttttggtggggttgttgagacagggtttcttcatggctatgtaggctgccctggaactagctcttgtagactgggcttgtctcaaactcacagagatctgcctgcctctgcctccttcatgctgggattaaaggtgtgtgccacctttaatgcctggtttatcttagagtttttaaaaatatttttatatttagattatttcttacaaacttactgtaatcacttgttcaaggagttaagtttggaatgatttacaaaggagatcatgtcatctgtgaatagatattttgttgtcttccttatccacctggaccccttacttcctcctcactccactcttccctatacttctcttccgtttttctccttatgccatcacttaagccttgaagtataatagtcagtatcagtggaaaggtgtgaaaagaatgcctttgttctgtagcctgagtggaaagttctagtttctcactatttggtagatgttaagtctaagtttcatttctttctcatttctattactcttacatcaatgaaagttttttttaattacaagtagacgtcttatccccaactattgatataatcttatggtttttttttcttgtgcttgttgatatggtgggttctggtaattggttttagaatgttaaacaagactttcatatctgggattaaaccctacttggtcatttcttttctcaaggttatgtgggctttttctatttctattttctaacagtcttttttttatttcctacttttggatcttcttttctttctgctctttctgcatccaagattttttgaaacacagtttttttaaatatatatgcatggcttagttttaaattgcatttacagataaagaaaaccttttgatccaaatagtagtaatgaaaccagtgttcctttaccataagcttcacatgcattttctactcaaaggtcagggaaaggatgcacatcacactttagacattaggacaagggacagaacaggtgtcatcttcctgccacacaaccagtgcagagctaaaatgagctagggctgatcctgaccactcccagaatcccttctcctactcttaaaattaggccaagagtgtttgttatagaaggtatccactgattatcccagaacagcattagaaaaggacaaggaaaccatactctgtttttctgaatgtatagcagtggatgaactctatctcccaaaggctcatggctgaaacttcctattggcatttgtataaaaccaggatctccatacccagcatcatctgctgagctgtcaggtccagggtgttgggaacttttatctcttaatttccattatagatttcaactcctccaggtttttccacaggcaggtatggtgcctaatcagtctgagcttcagcagcttttggggtgtcatttttatatgaagactttgctttctgtcctgaatttgctttcaccagcaggtaacttgttttctgcaatacacaagcattcaaggctcctccagctggtgcaaggagcccatccaacagcatgtggagtctggttgtgtcttttatcaccttgtgaattctctgtttgcttcatttagcacatcagagataagatcatctcttgctctgagggcttgagtcttgctcaattcatcaaattggacatttgagctttctcctaacactgtctcctcttcttccttctcataatgtcccataattctcagtctttgggttcccacaagatgatggttctcatctgtctcttctgccttctcattggcttcttgctcaaggaaatccatcacttgcctagtttgctttagcatgtcaacatcactgagcatcacattgaaagtgacactggaacctttcggtctaggcataaatggcagcatagtaaatcggaaagggaaagtgcatcttggaatttgacaggttttgtcttagtttcatttgttctaaacaattcacttctgttgagacttctaaaagccaaacgttatcaagcaatgtgtggttttagctacatctctgttattgatttctaatctaattcagtgctgccttgagcacaaactttggtgaatcctattcctttcaatttggttaagtgttttttgttgttgtttttgttgttgttgttaatgacatagaatgtggtttacactgagggatgcttcacataggcttttggagaatgtactattctgctggtgaatgacatattacataaatgtgaaatggatctaattaaatggtggtgtgtttagttcaactatccccttcctgctggatctcttaccaaccgaagaatagtgaaatgtccaacctgaataatgcattattctatgtcttctggtagttgtttccattagtttgcctcatgtattttgatattatattactagacttacattcattgcagactcatggtcttctataatccttctatgactctataattcccctctgtatttctgatggtgaaagtctgctcaaaatagaattgatatagctacttcttttttttggggggggtagatgttatcatgcctctttttcattaaggatttaatttcttctttgtactgaggattgaaccagggccttcattgcacatgctaggcaaatactctgttacagaattacagcatactgctctattattttgtgttgagaaagggtcttgtaatttgtccagcacagccttgaactcatggtcctcagatttctgagtactggggtttaacactataccaggttaatcccttaacttttaactaatctgtgtctttttatttaaagtaggtttcttgtatttagtttttaaagtctcttcataaaatatttggttttttgttcagtgtgggtattgagctcaggacttcccatgtgtcaggcaaacattctattcttgaactacacttccagcttttgtattcatattttcaatccatttgatgtcatatatctagacaaggaggttttgctattttattttattttattgtttttgatttggtattctctctgcttaccagaactctggttttatatgtgtcattagttatggaatactcagcatttttacttcaaatattacttttatttttttcacctgagattctcattgcataaaagttcaacattatataattatgtctcaaccttggaaattctgtcctatattttgttgttgctgttgatcttttatttgttctttaaagttcagtgttgagagttcctttaatttcactttgttttgtggggttaggggacaatctctctctttatatttcaagctgactttgaattcatggcaatcagcttcctgtgtgttgtgattataggcactggccacagtgatttgtttacattgtataatttacctgtcatttgctcatgttttgttaatgctatctgtttgttttcttaagacaagtcttgctatatggcctacagctggcctgaaactcacgagtctctggctttagcctccagaaggctggaattaaaatacatttttattgaaaattaaatacctccaggtggtggtggcacacatctttaatcccagcactttagaggcagaggcagtcggatctctatttgttccaggccagcgtgtcatagtctacagagttccaggacagccaaagctacacagagaaaccttgtctcagaaaaacaaacaaacaaacaaacaaaataaataaataaataaataaataaagttaagtatgatgtactatgtaaggaatggagctagaaaagcctttggtagaaggatttatgtttgtctgagtaagatttaggccatgattactcttaactgtagtcaggtgtcagaggctgagacttcctctagttttcttgtttctgttccctcttttaacatagttttcctcagaaactatttactcaatttacgataagagtgtcactctttagctttgactgatctgggatttactatgtagctcagactggcctcaaaccaacacaataatccctttcttcagcctcccaagttctgggattacctgtatgacacatcatggttaactacaaatattcttaaaaatagatactaataatgactgacctggcaagataagcccactgatgaaaaagtcacatggatgttataagagtaaccaactactttctgattagctttaaggctagctccacaagatggaacctaactaggccaaaacccctggctatctaattcatgggggagaaactaatgctatcttaaatgggaataaaaataaatttccccctaaattcttacctttatacctataagattaaaacagagactcaaactaggcaatgtgtaaagaataagagactgcagagtgcttcattctaaatggaataatatatatcacactctttctctcaagaattagggacaattatggaagagggggcaggaagattgtaagagccagaggtagtagacatctgaacaaaatttgttgtatttgttgggcatgtcaggactgtgggactgtggcatacatgaactcacagtggttgttactacatgttcaagtcctataagattaaaccagccaaaatcccagcatagaatagggaagagctcacgaaaccgcatccaccacttaactgaaggtgggggtttaaatgagttctctagacccaagacaaatgatatataggtgtttattaaggaaggacttaacgcagataaaagtcaataatcaccgaggtattcctgctccagaagatgcagtctctgctctttcaatggtctccacaacagaagagagcatatgtctccttctcctctctttaatgggtctcatttgcacctaaaaccaggtccaaagggtgtgaccactactacaagttcactgcaaggcaagatgtcactacacttaactgagcagttatttgtagttcatggatgccagtagaatgaattttcttcagggatgtgttctgggagaggttccatcctcagtagatggttctacacccatgtccataaaggtagcactaaggtccttgatgtgggaaggggaatatggtgaaaggagaaggacatgtcttagttactctcttattgccatgagagacgccatgaccaaggcaacttctaaaagaaggtatttgatttgaaggtatttgagagcttgcttacaacttccaagtgtgagtccatgaacatcatggtgggaaagcaaggcggcagcagccatgcactagagcaataactgagagcttagagcttgtctaagttggaggcagagagacaggagggggatgagggagagagagagggagagggggagggagaagaagagagtgaaagagaactagaaagagtgagacagagaacaagacacacacacacacacacacacacacacacacacaaacacacacacacacacacagagagagagagagagagagagagagagagagaattgtgctaattatgagcttttgaaacctcaaaacccattcccagtgatttaaccacccctcccccaccacttgaacaatatcacacttcctaatccttctggaaacagttctaccaagtagagaccaagaattcaattatatgggcctataggggccattctcatccaccagagggaggaatttgagaggagaaattgaagtatagatttaatcaaaacatgttatatgcatgtataaaattgtgaaacaataaaaacgattaagatcagtactgagtcttgctgcctcctcttacctccagtgtacatgaggaatctcagttatacaggagtgttgttgacagtgttaggtgttctgtattgctgggactcagtctttactgagctgctgctggatactccccttttcccatatcaagcactttgggactgggtatacacttcctcctaggttagttaagttttcatagaactactactcctgttagactttgctaaaaaaaatattcctaaggagaacaagaaagctatgaatatcttatacaaaggtagataaggactcgttttagcatcatgatgagaatgtagtagagttcttatgataaaactcaatacagtgaaacttggcccacgatgtggttttctcttctgcctttaaggccacccttttctctgtgaccatattgttctgctggaacttagggaatgttactcactgttgagttgctgtttttctctacagatttcctcctcttattacaatgataagtgtaacagcatccaacctttttttgattataaatgtaatgaccatatgaatgaatgacttcagaacagtgtatggcataaaatgagaaaatgtttttcattcttactatttcgttgaaaaatggtctctaatcataatgacttaacatagtacaggtatcacaatattaatacagttctctgagaatgttgcaaagtatttccaggactataggaatatttgctgtcttcaaatgtctgcattttgagttacagatggctgttatatgggaacacatttgagctgtaaagtggaccagttacctgcaataggaagggatagtgaggaacatgacagacaacaatagaaattgggatcaaggtagtgtgagtttgggaatagaagagatgatgaatcggataatagcctctttagatatttgaccccatgcagaactgattcaaccagctctgtcttttgtattcaggatgctacattctgatgagcattgctatttgtgccatcagataccaccgaacagtttattccaagcaaggctgccctttggctcatagctgtcactacaggttaaagcaaagttgtcacagacgtttggtctgcccaacctctttgctcagacagagcatcaccaccctgattactgagggcttgcttgctttgtgtgctaatgagtttttcaggggttcatgattgttgcagcctcggaaaagcaataggagaacatttctttgaatctgctgcttgcgaccatattacctcacaagtgagtgattactttggcccaggtcccctgagtactctttgcttgacattgcttttcaccaagtaccacttctaagaggctcactttttttcttgctaccaggactccatggccagcaatactaactcacctacttaaaattattttttattattattgtgtatgttggctggctagggtagagctgggtttccttctgcctaaccatgggttttggatattgggtcaataggcttgcatagcaagtactttttccactgagataccttattcaccttctggtgctaacattggcacatggttctatttgagtaatttcatatctataaacttggaaggataagacttgctgcacacagatggttggaccttaactatactatgaccattgaattaattctagatctataccttggttccagtagattatgtaagtcactaaggaagattgttcagatagggatcactaaatattatctctctcagaatgattgaaacatctgggaaatgttaaacagtagctgtaccattgcaggtcagaacctgggtttgcagcagtgacctgcccctcaacacacacaccaactgcaagtcggttgtgcaagaagacccattggaagtgttattgccacacccgggaggaatgctctgcccatatcttcagtgcagctctcatgttcctacttctgctactaccactgaaaagaaatgtgaagcctagcatggtgtctgtgttagtgtcctattgctgtgatgagacaccatggccacagcaactctaatacaggaaaacattcagttggggctggcttacagtttcagaggtttagtctattatcctcatggtaggaaacatgacagcatgcaggcagatgtggtgtcagagaagtaattgagaattctacatctggcttagcagatagcaggaagagagaaggggacattgggcttggcttgagaatttgaaaccccaaagcctgccctcagtgaggtatggagagagtgtacagccttgtcttgtccctgattttagaggaattgcattgagtttctctccatttaatttgatgttggctgttggcttgctgtatattgcttttattatgttaaggtatgttcctattatccctgctctctccaatacctttatcatgaaggggctcagggagtatccctctgtgtggaatggtttcccaaagtccacacctatgctagggataagtactgatctattacaggaggttccatagatttccaaggtctcctcactgaaacccacgttcctggggtctggatcagtcccatgctggtatcccagctaccagtctggggaccaagagctcccccgttgttcaggtcagctgtttctgtggatcttaccagcctgttctggacccctgtgcacatcactcatccttctctgcaactagattccagttgagttcagtgtttagttgtgggtgtcagcttttacttccaccagctactggatgaaggctataggatggcatcatcaatttcattatcaggggactgcatttaaggtagcctctcctctgttgcttagattgttagctggtgtcatctttgtagatctccagacatttccctggtgcctgatttctctgtaaatctaaaatggctccctctattatggtatctcttttcttgttttcttctattcttaccctgactcaactttctgctccctcatgtcttcctcactccacatcttgatcttgtggtagactgattcctattttcctgaggagtcgccatactgatttccaaagtgactgtaccagttggcactcccaccagcagtggagaagggttcccctttctccacatcctctccagcataaactatcattggtgttacttgattttagctcttctaacaggagtaagatggtatctcagagttgttttcatttgcatttctctgatggctaagaatgttgaacactttcttatgggcctttcagccattttagattcctctattgagaattgtctatttagttttgttccccactttttaattggattgtttggtgttttggagacttgcttcttgagtacttcgtatattttggagatcagccctctgttagatgtgggaatttgtggatacgtattgtttgaatctggttttgtcatggaatatattgttttctccatctatgttgattgaaagcttttctgggtatagtagtctgggctggcatctgtggtgtcttagtgtaggtagaatatctatccagaaccttctggctttcagagtttccatggaaaagtcaggtgtcattctgataggtttgcctttatatgttacttgacctttttttcctttgctgctctttatattttctttttgttctgcatgtttggtgttttgattattatgtggtgaggagaccttgtttttggtccagtctatttggtgttctgtaggcttcttgtactttcattggcatgtctttctttaggttggaaaagttttcttctatgattttgttgaatatgttttctgaccctatgagttggatttttcaccttcttctatacctgttattcttaggtttggtattttcacggtatcccatatatcctggatattttgtgctaggaatttgttggacttaagattttctttggttgatgagtctatttatcctagtgtatcttcaactcctgagattctctcttccatctcttgtattctgttggttatacttgaaattgtagttcctgatcatttatccagcttttctatttccagcattccttcagattgtgttttctttattgtctctatttcagtttttaggtcttgaagtgtttccttgaaagatttgttgatatcttgtaatttttggtttgttttttcttccatttctttaagggattttctcatatcctctttgaggccctctatcattttcatgaagatgtttttaaggtcattcttttctgcttcatctgcattgtgatgttctggtcttgctggtgtatgattcctagtctctggtggtgtcacattggattttctgttgttgaatgtgctcttatattgtcttcttcccatcctttcctctggtgggtgtagcaggagtctcttcctctcctggtgggtatgggacccaggttcccttctggtagatgcaaacagttccaatactctgatgtctgtcctattctcctggatggaggcaggactggtactggagcctagacaatctctgggtgtgctggagcccaccggtagagcttggatcctgtgagcagtcccccagtgccgggtgtccacgtgcagggcctgggaaaccaaactggaagcagcccctgtcctacctccagatggaggccgggctgttactggggccttggcaatctcttttgtctctgcctttttagtaataggatacactctaatagttggcatttgcacttagcttggggtcagaaaattgtttatcactgatttttttaaattttctgatagctatgaacaatttttgtaattttgaaaggctggaaatgcaagcaggcaaataacatttcatcatatataatcgtgaagtgaaactcaagtatcagttttgctagattccaaccatactaatttgtttaattcccgcctgtgactacttttactccatataagcagacatgagtaattacagcaaagatctgatgaccccaaagcctagacactcatcctgtagacttaataaagaaatgttaagagttgctcctgtacgtaaactttggaaatggttactatcgctatcttctggtgtaggaaccaagtacatctcagatcctcaaggtctcctcagctcaagggaatagtgtgtttcaggttcttgaacattctccctttctcctgtctgcccatggcctgggagaaaaaaaacaaaaaacaaacaaacaaaaaaaaaacccctcctgactgcagttaaccgcctgctagaaggcctgagtctgagctcgggttgtagactgcatggtacctttgaattatgcccctgatttctgggtgactccttcagtgtgatagattcaggaaacgctgaaaaagattaatgttttcattttatagataaaatgacggacttgcttgtaaagaagttaaggaatttaccgaaggtatttgcagttcatgtggccaaatgccaattttttgcatggatcttataacatgtgttgtgaggctattgctaatggactgtacctttgtagtcataccaagttgtggcagtcttcagaaagcaggttacactccaaatgtaaatagatccagagcttaccttcgtggatttgagtgtttaaagtggaagccgggagacccctgagaccctgttagtacttttcagtggcagctctttcagaagcaaaagggccagaaagcttgatgtagagaagaatgaggcattaataaaaaatgatcttggggtactctgacaccaagatgtgtaatcttcctctgtaattagcatcaaagctttctctatttgcagaagagggtgcgtgactagactcgaacttctaataaagatgtttgaacatctgctgaccatcctgagatgaggttcattattatctactactgttttcagccatctggatggtcactgttattaatcttcctcacagaaagaaatattaatcctggatgtatgtatcaaactaaggaatcctaatcaccatttcttgctctagagaggaccaaagcagctgttagaaagataagagatcaggttgagaatggagtgtacttacatagcatattgaggctgtaggtttgattcttatgaacactaaatacatatataaaataaatgaaaaagtttataaaaaggagtaaaggaaaagagaagcccatcatatcagctgttgaatgtgttgctgacttggattcactagctgaaagaattttggaagtaggcaggcatggtggatgcccatagtcccaacactaaggaggttaaagcaaagggtgcattgagggtgagtgggttgagataggttgtgaaatagaggactgaagagcagtcgttgctgaaacctagaaagaaattcagattttcaactcccttaaaggtcctgaagtttattctaatgcaatttggattaaacattacaggtcgagcccagatccctcagtgacttacaaatgattaaccatgcgataatagctaattatcattcaagcatgactacgacaacacacagagtaataaacagtagaacagtgactttagtctttaaaatagtaagtctcttgatgacctacagttgttacttcaacaattgtgtgggacagcagcctgccttgtgtgttgttttacaacagcagagtagaactgttcttcacggtggttcactctttgcttgcatacctttcatacttcaataagcagttaagctgcttctatatagccaaacaaggaaaaatgggaaaaatgtaccataaacctgaacaaaatgaaattagaatcatatttttaataatggttcaaaaattaagaaagatgaaggtctgattaattttctattttgtttatctagattttgctttgaaaagttattttcctaccatttgcaagaagggactttgtcaataatgtcttgacccatttgggggttacataccagatatttacattacaattcataacagtagcaacattgcagttatgaagtagcaaaacaaaataattttatagttgggagttaccacaacatgagaagatgtattaaaagctcacagcatttaagaaggttgcgaaccactgccttaggtagactgttacatcagttcttcaatagaaggtggctgaaaggacttatttttatatcttaactatatactccagtttttggcattatctattcaataccagaattctaatgaaaacgtaaagcacaaaaaatttgggttccaaaaactcagtttccgaagtcatatataattatgagaaatagttcgtactcttctccctcaggccactaacatattgaaatttaactagaccttttgaattttttcagagttactcgatgttttttcaattaactgtatatagaacaccatgaaaaagtactgtgagatgctggtctaatatatctcctaataaggttgtatctcccttaaaatggattatccagattcccactcttgcaggacaggatcagagacaatggaaaagaagacagtaatgtagctttaggcatctgagtctctggagacccagagttcataggggctatgtgcagtggatgctgcattcatcctagctctcaactccatcctccttctcctcttcctcctcctcctcctcctcctcctcctcttcctcctcctcctcattctcctcctcttttatattgttttttgtttgttttggtttttgattttttgagacagtttctctgtgtagccctggccatctgtagaccatgctggcctcaaactcagagatccaccttcaatctatctcctgattaaagatgtgccccatcagtgcccaactattcaactccatctaactggtcagaaaccactcttgtgtagccacaatttttatgagtaaagatatattgcataacatttaaaatgtaaaaactgttctgtgtgcaggagtaggctgaggagtaggcaggagtttgtgtctatatgctactacctgccagctctttccttccaactttgtgtgaattctggtggagcaactcagaccatcaggcttatagggcaagtacctttgcctgttaaatcatcttaccagcctcatgtactattactctaagatttatttctctattcttcttaaatttagcatatgttatcataactctttgcaataaatttggaattcattcttataatgaaagtatatgaaaaattaagatattcactaataataaaaatatcacatacatagaatttttgcatttttattattaatgcatatatgccttctttttgcaaaggtctttctttgtatccctggctgatcttcaacttgtgatccccttgtcttgtctcccaagtgttggaattacagtggaacacactgtgccgagccatataagtctttcaaatacagttataaacaccatgacaaaacaaaacaaacacaatggcgtcaaatggcccaggttgaactagtctgtgatgacataaaacagaatttatttgacgaaaacaatgtcttctgagagttttctggaagatggaagaacaggaaacagcatgaatttttctcaccctcaggcaattttgcacagggagaatctcttgatttaactgttttgctgtcctggagtctattaaaagcttgcaatttccagggcaaggcttggaaagtaaatagtggttagtcttgaacaattccaagtgttagcacagtagcagcaatcaacctctgacccatagtctcatggcaggcagcttcacacatgtcctcggagccatagttggtgcaaagccttctttctctgcatattggggtctgtgttctgatcgctggccatggaatctgatcacatacacagaaaaatctgatgcatcttgctgtggcagtgatagccttaagcttatggtccttacgcttctgcctctgctgtgtgaattacatgtgtgcagcactatacctggcaaaaaagagaaaattctgggtacgtcccgtaatatagatgaatcttaaggatgttgtgttgacaacaacaacaacaaaatcccaactaccaaaatgtgcttagtattagtatatgattgattccctttagtaaagtgctcagagcagttgcaaactttgaaacaggagacaagttggtgagagaggcttctgggaagattcttatttaatggatatagatgttcagttttgacatattccatgtacttaataccagtggattatagacttaaaggtagttaagttgtaaattttttgtcctgtatactttatcataataaaaaatatgggaaatactgaatgtcttctaatgttactcttttaatatttaaaggaattttcttttgtaaagaaataataaaggacagagatggtggggttcagttcatgccattttagaatattgtttctcgggaaaataagtagtggttctccaaagtcccaaagcttcttatatggctttaaaatgttgctgagtttccagccactgtaataactgacaataatttgggcttactactccttcgtagtagcaatggtgagtctttgtgatcacgctattcattttattcagctctctttgtctatttctttcctagcattagcccaagtctatgttgcagctgtgagtttcttctctgtgtagataactattccatcatgcaaatgaacattcaatattggtctctctgagacatctttctgaaacagaaataactggcctgaattgaacctgctgttattacattatctttcattacctgacaactgatgcactatgggtcaattaaacatctcagagaaaataacccctaaaaacgggacctcaggatgataatgacttaaacattagagattatggggagcatggaaaacagccaggtctaccttgtcatgctacaaatgactaagccagataaatacataaggttcctgtggctaacgaaactattcaatcaaatgcatttctactacatgaataaaacagagttcctttaggcaaaaacttcctgtcagttgtactgcaacagatatcatccaatataaaatatgtgtggtacccttgaacgaattggtacaggagaccgcttcctgaacacaacaacagtaacacagacactgagattgacagttaataaatgggacctcctgaaactgagaagcttctgtaaagcaaaggacacagtcagcaagacaaaacagcagcctacagaatgggaaaagatcttcaccaaccccacatctgacagagggctaatctccaaaatatacaaagaactcaagaagctagtcacccaaacacaaaataattcagtgaagaagtggggtacagaactaaacagagaattctcaatagaggaatctaaaatggctgaaagacacttgagaaattactcaccatccctagccatcagggaaatgcaaatcaaaacaactctgagatgtcatcttatacccattagaatggctaaaatcaaaaacaccaatgacagtttatgctggagaggatgtggagaaaggagaacactcctccactgctggtgggagtgccaactcatacaacaagtttggaaatcagtatggcagtttctcagaaaaatgggaaccagtctacctcaagatccaacaattccgctcttaggcatatacccaaaggatacacattcatacaataaggacatctgttcatagcagcattatttgtaatagccagaacctggaagcaacctagatgcccctcaaccaaagaatggatacaggaaatgtggtacattcacacaatggagtactactcagcggaaaaaaaaataaatcaaaacaatggaatcttgaaatttgcaggcaactggatagaatagaagaaatcattctaagtgaggtaacccagtcatagaaagacaaacatggtatatactcactcatatatggatattagacatagagcaaaggattaccagcctaaaattcacacctccagagaagcaaggaaacaaggaagaccttaagagagacatacacagtcccccatgacgcagagaaaacaagagcccctgaacaaattaagagcatggggagagggaggatggaagtagaagaaagaggatgggagaagaggatgggggggtgaacatgagggatcagggagactgagtggggagcagaatagaggagagcaagaaaagagacaaatcaatagagggagccactataggtctaaagagcaatctggcactagggaattgtacagagatccacaaggatgaccccatctgggaccctaagcattagtggagaggctgccttaaatgcccttcccctataatgagattgatgaccaccttaaatgccatcctagagccttcatccagtagctgatggaagcagaagctaagcactgagccaaacgcctggaatcctggtgtagagagagagaggagggatgagcaaagcagtcaagacctttctggagaaatctacagaatcggttggcctgacctagtgagaacacagggatcccagtcataaaactggggaaccagcactgaactgaaccaactactctgaatgtgggtgccagttatgaggcctgggcatgctatgggaccttaaacagtggaaccagtatttatctctagtgcacaaatggactttgggagcccattccctatggagggatactatttcagcccagatacacagaggaggacctagaccctcccccaaatgatgtgacagacttcaatgagtcccccatggagggcctcactatccttggggagcaggtgggggtgggttggggggttgatagggggcatgggaggatgggagggagagggaatgggggaaacgggggaatgatatgtaaaataattgtttctaaataaaaaaaagctaaaaaaaacaagggtttggaaggaatcagtaaatatattttgtacattccttctgtaatgctctcaaccgttgtaaataaatgcttattagaaaagcatactgaaaataacaaaattcacattcatgaaatgtcctgctagaatttttcttatttaagaatttatgagatcacatcatatatattaataatccacacaatatattagagtactgccttcaaagttcacagtaaaagagaaaaaatatcaccactatacacagttgatacatttgaatgttcaagtgttactttgtttttgttgttgttgttcctgtgtgatgtagaagcttagactgaatagtcttcataagttttgatttttaatgtagcattatatttcatgtattttcatatacattttctcttattcctcacttcaggcatgttttcattaagccgattatggtgacttatggctataatcccagaacccaggaattcaatgcaggagaattgctgtgagttctggacatcagtctcaatcaaggcagttttaagggtcctgaagtattatatattttgaaaagcaacagaacagtagtgcttgagaaaatagtccagtagagaactgaatgtctttaataatactactcactatcatttatcatatgttcgccgtgtttcacacagcattgcacgtagtgtgttacagctctgatggtaaaggtatcctgataattggaaaccaagggaaacctgtgaatgttacagctctgaagggaaaggtatcctggcaatcagaagcaaagaaatacctatagttttggaggaaaaaacaacagaagtgttacagctctgttccagcagcggttggtttccacagcaaaatgttatagtctttgatccaggaaaggtttccctaatgcaagtataacaactctgctccagcagaggagggttttcctagtgaggttgttacagctcttctccactccgctctgctctgctctgccctgttctgctctgttctggataagtgttacagttccactcagctacccaaagtgaaagttgttacatctctgctctgctctggcaaaagaaagtcattacaaaaaacctcactcaagagatttagtgggagggaggaatgcagaagagtggctgtctctgtcagggtggaaattgggcagctccaaacagttacagggctttttatagggtttcttaggggcagggtttccagagtgaagattttcagggtggggattagtaggatctcaattcctgagcttggcacaggctcagagattggtgggatttcatactcagggattggatggtttcatgttttgggattagttgggttttatgctcaggagttggtttgtttttatgttcagggattggctggatttcatttcttgagttggttaggacagggtgggtttcattggctctggactcagaaccaaggtgttctttcactggccctttttaccttacacttatgttgagttttttggtccctctgtgaagtgagtgaagctgaacctgttaacaggtgaagaaacttgttcagggacacccatttaaaaagacaacatgtggtagaattggatgctaatctgccatgtgactaataccaggctttgctttgcgctgttctgtgtctatgtggatggttgaagcagcatctttcttgggaccaagtgtgaagccttatttctacaaattaagatggcccatttctattggaggcaatgacagggcatgtgatccagccaggtttgtttgtctattggttttggtgatgggctgaattgtagtgcctcatgcttgctaagcaaatgctcaaccactgagctgctcaacagaggcaattctaaaggtgctgatgcctgctgcttgtgcaaggctaaatcttgtaaagccttcccatcatttgacaatgtctgttcaatgataagcttttgggtacctttattggctgctgccaagaagctatgcataaactcagcaatgttgttttctttgtgccagaaaggaagttaagatcaaggttgtcccagaagtaaagagagagattcaaacaaacagaccatcgtattgttttcataatcagtcctttggggtattttcaagaatggtttaatatccttgtaagaaatggtatctgagcttacatatttacttatttattccttttacaaatctctagtctagaccaatagatattcctctaaggctttggaagtaagcccagtatatggcatgatgattatgttttcaaagcacaggtttgaggtcacatgctgactaagaagtcacctgctatcacactggtctacagcttcagtgtttcctaaagagagagagaaacagaggcagttaataagcaaatacagacagcagaggagagactgattgatggagagagagcatgttcccagcttcagtcgggcagttgatcccctgctctggccacacctagccaactacctgtttgacttttgtgagtgtgtgtgtgtgtgtgtgtgtgtgtgtgtgtgtgtgtgtgtgtgtgtgtgttgctggggtttaaactaggatgctgcattctggacaagtgctctactattgaggtacactcccagcctccaactggttctatttttgcattggaaaaataaacatctttatatgatttttttaaatgttaaattagaaccccttaattctcattcttaaattctagctaagattttggctacactaatgtggagagcaatggaaataaattctccgtagctttttttttaaagtagatagtacgagttctgttgttataagtttgttgtggggattagaggaaatagttggaatcatgtggcaggagcttttatctgcttaataacacctagtagctttaacggcagtaaaggggactcttcacactgttatcagtgcagatggcagtgaagaggggggttgcccaaattacgattccaaaacagacagttatctcagcaatgaaacaacacagctagctagcatttaggtaacatattatctatgaaaaaaagttttttattattataaacagttacaaatattttgatttgaataagcactgttttcatgtatacacatcgagttagagaaatgaaagaacaagctggaaacagtttcccaaggtgcagcgatagaaccgcataaaaactgaaatggaaaagccttggcaatatgattcagaaagcaatcacccaggcctgaagatcagagcagcaaatcagataagaaagacagagtaatcactggagaagagggaattggcctggtggttgtgtgtctgtggttacacatgcatgctgtgctcaaagaagcccgactcccttgtacttcttctctcttcaatttggttttaggtcaagctttgggttcaatctacattaaaaagcattttcaagttttgcagcttgaaattttcttttggaatatccctgttcacattttaccattaagctttggaaatataccgaggattgacaatcactccattagttagcatgaacttactggtgttacagtaacaaacagctacacccaacagcagcccaagtttatccctcattagtgttcagcatacgtctctctgggcatcgttttatggtggtctctcaaggaccaagtttgtcattaactccatgtgatacctgtttccaagattgtcatggcaaagacaaagcttcatgtgttttcctccctgtctgtgatctcagtactatggaaagacaaggcttcccgattggtgacatgaagcaagactccacaggataccctgtagcttcagcatcactggagtatggacacacaggtagaactcacagctggtaataatacctaagcaatgccttttgtctcagagcaaataaacagagttacattgttctttttatgtggatttaaatccagaatcatgtgccaaggctgtcagtcatctgggacaaagaaaagattagacaaggttttgaaaggaatgctgacttggggaattgggagaactgtctccccagatccagtctcaggatggtcctgtctgtactgtgtggtgctgaagtgagtctttcttccctcacaccaaataccttaactccatggagagtgttcagacccctggctggccggccaggccatctttgctcttttggcttttttatcttaagcttggaaagactcttcctgctcttcatagggaaggtcatgagactggcatggagagcgttcaggtccctagccatctttgctctgttggcgtcttcatcttaagccttgggaagacgcttcctgctcctcatagggaaggacatgagactgcaaacctcagagaacagttaagtgtttgattcatttgagatttgcttgatttatatgtgggttatggtgtcaagagaaaaaaaatccacacaccgcagatttaactgtctggtcctactattactacaaagaaacagtcgattctgtacacatttactaaactctcagaatggagttctgtgactggaggcttgagttgagattgactcaaagacactggtgatctattctcacagcacagataaacacttctcccctgacttcctaccaccttgaaccagttaccaaatccactcatcacttcttattctttaccttatgtattctttctttggaatgtagcactatggatcactccatccttcaaacctttgtcaacttcataattttctcaccatctctagtctcattgtcctagtttgttttacaaactgagtccatggtctttctttcatcaaggacactcactaaacttcactgaggcaatttcataacattaatatacatatgtaaatatgtctaaaacccatatctcttatccattatttcttcagtagaaccaggtattgtttaattttcaatccatctacattcacctcatcacacttgaagtgtcattgccttcactccttttcatctgtctacgttattgaatgtgaccttgtctcaggtaagaatggggccttcttgggttcttctcttgatttctttcttttttttttttttttttggctttttcaagacagggtttctctgtggctttggaggctgtcctggaactagctgttgtagaccaggctgctcttgaactcacagagatccacctgcctctgcctcctgagtgctgggactaaaggcgtgaaccaccaatgcccagctcttctcttgttttcattcctatagacaagcctggtgtagtgaaccttgtccaaagcttatagaatgtacccatctgtcctgccttgtgtacaataggggctagatgtctctttccctcttagtttcaacaactagtccatctgtctgtcatttattgcattgaataagtaatctttgctttatttaaccacctcttgataataatctccttaatggtgtctttgaacctagaaacagtcacttatgtctaaagtcccaggagtaagaactctaacacaaagctacaacttcagatgaatgaaggtaagaaggtacagatgctgagaaataacactacgtatgatggagttttgtaaaacagcaacacaaagcaacgctcctctgctcctgaggaaattatcccccaacaacaacaacaaattgcagactgaaagcatcatttttaaactataggattttaagaaataacttagccctacttctgaggactttttcatctcttccattacctatatttgacctttgatattattattgttaccacaagagagagaagaataaaattagaattacagtttttttcctgtaaagcaaaatataataattataatgatggcctaaattgtgtgtgtgtgtgtgtgtgtgtgtgtgtgtgtgtgtgtgtgtgtgtatgcgcgcgcacgcgcgcgcgcgcgcgcgtgcacacacacaggcatgcgcgtatgggtaacagatgcttagatagaatcaaagaaatatggcaaataaaagcaacaatttgggaaagtaaagtatgcagtcttcttatggaagctgatgacattggggcctgaagtaactcattttgcctgggtccttacaaaccttggagatgaaagctttcatttgtggttgagctttctctgtggagttgataataatcagaaggggaaatgtaagagatttcaggaattatccataatgtttcacagaaatttagacagaaggagctattgttctattcgattagtagaagtaccttctcttaaaatgtagcctcttaaactagagttagaaaacactttaattttgagaaaattgcagaaacaaggatgagatattcttagcactggctagtgctcataatgtcatttctagattttatttccaggccacttgacagggcttcatttacatgtctaaagttcttcttttcctgtaagcccagagttgtgtgtttcatatgattatattatatccattctccagtagcttctaggagaaaatgcattaaataacctatgaaataaacagaaagtaaattaacatgcattcagtgactcttccctactgttagcttgctttgagtggttagcttgatttaatgtttccaggactttctgctactatgtgctctcagagaaataacattgaagcatactgtggtgtgtatgtcttgggagaagaataagaagtaaattcttgcacaggttattcttattgtttcagccagacttcaggcttcaaatccaaggtttgtacatggcacctgtgtttgactactctatcaattgtctatttacttactgattaattttatcatagtttaatcaatttattaaaaattatactgtttttatttttacactgactcatgtagagacttttggtcagcatgctaagggctagcctttcctcagaaatgggttaagtatctgatttccacttacactgtttgctgaagcctaaggattcatccaagtaagtttcagaatcagaatataaatgtggttaagatcaagtggaaagatatttacttatactccccaagagtgcattaatatctcagatattgtatagttgtaggacataaaattgttttcctcttttcatttttatttacctctccagtcaagaagccactgtagtatgtgatgtcctccaaaggttacaaagctccagggctgctccctacagagtacctgggctcacacccaattttacaaccccatttcccttctagatgactgtgcagtgtattaaaccttctaaggcacagggtcttcatcaagaaaagcaaggacaaatgcaccgatttcagaggatgcttgaaagctcacaagaggattaagtgaacatacttttgagagtttgatattattgttgttgctgaaatggatatcatatcaacagtgaaagtgcatgagtttgtagaatatgagtatatacaaccctttaagtataaaatcgttctgggtaagtgatagtgcttagtttagttttcattagtccatctcataaattagaattattttggatcattgcagttattctctttgcttctctccagcagtggggaatggagttgggctcttgtacatgatgttacatggcagtactctaccaatgaactacatccttaacccacgttatttttgtgttttcactgttcctccattatcaccaatgtttaatagccagtattgtgcattatttgtttattcccttttagaatgtaaaagtatttattatatatctttgcttacagtaaagaaagaagcctcagaggaaaaaagaaaccttattttattttcagaggtgtagaaaacacattatatataagtagcctgagaattgtcctgccctcttgtgattggtacagcttcatgtttagttttgtttactttacaaccattattaattttaaaaatccacagtggaggggctggaaagatggctcggtggttaagagcactgacaagctcttgtagacaaccagggttcaattcccagcacccacatggaagctcacatatgtctgtaactccagttccagggtccctggcaccaatgacaaaacaccaaagtacagaaaataaaaataaataaaattcctttacattaaaaaagaagccccatttaataataataataaatccacagtggattacaagctttaataagtacaagtaagtacggcttggacttaacaaacattaaaatgcagagtgcactgaccccagcgctgcctttcttccccatcagtgattaaatgcctatttgagagatagatttgcttatgcccttcataggcattagttatccttttcagccttctgccatatagcttggtggttggggtgaagatccttaaatatcctctctggtcatgaaagagcatttttactttaccaacaagagtaatacacacaataaataagtgtgttacagtgttacataaataaaacagggagatgtaaattcttcttaaatccaacacagtttgctttgagaatttatattgatgaataagcctgtttatatcatcttagctactgtggaaaaaatgagaccatttgttaaagatctggaagagaaaaaaaaaaagcattgtattttacatagcatttccagcagtctctgaggtaaggctttagtttccagggtgataatcttggttgctgatggaatctttaggagacagagcccaggaggagatttttagatctttggggacacggccttgaagggagtccttcctcattccctttttgctttcttgctgtggagatcagaggttttattctattacaagctcccaccaccatgagctatcttgccacaagctaaagataatgacatcaatcaagcctggaccataaccgccaatgatgagagccaaaacaagcctttcctccttagaaggccttcttagatatttattacagtgacggaggctccctcatccatccagatgatgagaatcttacacatacatgatttacatcgttcttctaggaactaatatggctttctacttgcttcaagaagtgtccagtttgccaatccctgttgtcctctgctcagttttatttctcatatcttttctacattctttatcagacaggtataacaaatcctctctgtcttttcaggattttagtaaaaaaataaactaaactgtaatttcctttcctttcacacagtctgagttcattgcatcttgtatctccctggaaaactcttctcttattttcgggatcagttttctgtttatcataggatagctttaggacagttatcatacacccctgtccccaccccagttctatccttgctctacctgcataattccctctctactgcataagatgattgcatttatgttatttgaaagcatggaatagatacgaggcctctgtttacagttgcagcagtggtacactttgagatatttgttagtggctgtattggtgttttaattcaagaaaaaaaattggtcagccatgccatttagtgtgagccaaggatatcttacaccaaagctactgcagacccaggcaggagctttgtatggagattagcacatgcagacctcaccatgccactctgtttcagaggagggtgggaatgacctcctgggacctcagagcaccattctcttcagttttaatattgaatcacttccctcaggagtcttctttgcttccatttatccttccacccaagcaacaaaactagtaagcatttttctcctctagaacaactaacccatcttttgggtagaaaaccctcttcagaccacagcatgtatttttttttttaattgaaactggcaggttaaagattgtcatttttgggttgcacatgtggggaagaaaatcataggtagtgaaagatgagtatcttcaccaatgtctcgctctcctcgtgtacctgaaaccactccatttcattgagtttcaagcatcatcaactagaggaaacatcatttcagaaacagcacattaaaaacccaacatcttagaactaaggacattaatattaatagcatgtatgaatggtttggtgatttctttttctttgttctgtgtttatcatcttttataaatatatagtacttttaaatgtggaaggtaaaaaagaattatttttctgaatatttattacaaataaaaaatcttgttaggccaggtatagtggtgcatgcctgttatcacaccacttgggaggttgaggcaggaggatcaagattttaaagttatcctagacatcctagcctgagctacatgagactgtgcgggaaaaagaatgaggaaaaggagtggggagggagggaaggaaaacttgctcagtgaaactgaaacttttgaagcatcttctttttgtagagtgtttcagctgagctgctctagtgagccctacactgaaacatatacacatattttattatattttaccatacatgcttgttttgaaaacaactcttaacttgtttgacacatccttttctatgatgtaaaacttcatccataaaaacagaacagtctggtgaactgtttgcccagtattgattctcaatcccaagagaaacacctgaccaattttagtccattcatcttctttcttctaaccctaagcaatgaattagagaagatttaaggcatttcataatttgtttttcaataaactcattaatatatatctcaaaaccatggggtttaataattatattcatgattacagctatttcacctaaatctgaacaataacttaatgccagtaaatatgaggtagtacgccatagggaatcgtaaaagccccgaggtataaaatcccaagcaaatatgtattttgaactgagcaaggcctgtagaagactctgagaccagctgattgaggtaaattggcaagaccattattttcatgggccaggatcaagtgcaatggaaagcttttctctggagtctgagtaagagtgtgtgcaaagactagcaactattccttcctcctgctgggtgtctgcagcctgagactgcccacctacagagaccccctaccagactagctaaccctccctctgtgctcatcaacttgctgagattccaggttgcagaatcccaccatatcctagcttcattgtatgtgtgtccatgttcgtcttcattcctcattgcccctagccaggttttcaagactcaagttgtgaaattttccctgtgtgttctgcatattctctttaagttttatttgattcaaggtataacccatatgaaaactggatttgagaagaatgtctattagatccaattccaactatcgtgtctttctaatttttaaaaactctcttcattcctctcttgaaacaaaaaattgggcctgtggtatttctaagatcatattctttaccccccccaactttggttgttggatctaggagctcacagctgctctgtgtcacatgaatctttctgtgttgacctggataagaagttcatttctgttgccatcaaaagtgttggcgtatctctagtacttgaggtacatgtggcagacacgagcatgagctgctcctgtcgagagctgccctggcttttctcgaacaccaatcagtgtttctatttgtagctcattatctttcattgccaaattttcacacacatatccttcaattggtccgtttccttgttagagacatttgtctcttcccagtttgtattattcaaaatagtactatagatagcttgtggtgcatataatccttcagtctgtttgtccacttagtactgttcctgaggcctcagagatacagtgcttctcccttttaatatacatcctcaatgattctgatatcataacacttattgtttttatttcagtctcataatgtataattgcacctcatttaaatgaaattttattttctgtggttattagtaatatcgacatcctttcatgtttattagtctttttatttcttgttttataaacttttagaattgcttatcacttaactgcagggttgcttgctttattctttctttcaaggcttcttttgataatttgagcatgaattctgtaattgttcttttaagtatttgtagttacttcttttcttgtggctgtgactaaataaatatctgacaaataactaagaaaggaaagattcatttagatgtaacttccaaaagggttcacagggtagaacagagatgggaaggcatggctgtggcagaaggaacatgacatggctcattacatctttccagaaatcaggaagtggacaatcaagcagccctcacaactcacctcccaacttcttggaatttcattttaagatttattccatgtctcagacatagatttgaggtattggcttcttcacttctgattgataatgagtatttgtttgttgagagagggtctcaccatgtagacaatactggactagctcttgggaatctcctccctgagtctcataaaagaatgttgtatttatagacctgtgctacctaccacaccagacaaaggttttaattacagagtatgcagtttgtacatcttttcatgaactgagtttctgccagagtatccctcagtttgtcctcaacatgtttgtgctgtctaatcatttacttagctaacctaccagccctttgaattaagtgttctgggaactctggtccagtccctataatgtcttctgagttgctgtggaagtagccatcgactttaccctccacctttaaagttcagactttgatttaacctaatctaagggattctctaaagtgaacaaagaaagccctgacattaacactgtctgtgacatgaattcccccattgttcatcatgggaaggctcttaaatttagcagcaaaatagatggaaactatcagatgtcatctttaagatgtgaaagcttcattccccgagaccaccatatttgcatttttctgcaaacatttgtgttgtctggctgaataagcttcatttggtgttccctgactaggatcaagtttagatacatttacaaatgtgttttgttttgaattgtccaaggtaaataataagatttaaaattcttatgcaaatgactgaagaaaacatcctgaagattcatttagtgtaaaaaagtttgcttttgccaaattctaacagcatgcccacatctagactttattgctgttcatcatcctatttgcaatacacatcttgtaatttaggtagtctaggaaagatttcaacaagatattagtgtgtacaatatatcctcagtatctaaaacacagcttctgatttaatagtttactatccatcataactttggcctatctgaacatttatttgaaaagaagttcaatttaaggagtcagttatgcaaaagtaacatatttaatttgtaccttccttcaacatttgtaggatgttcttagctttatgtaagttactaaggacatggtaattaagccagtaattaacacaggctcttggccttgaagaccatgcatttcaacaagcacaaaccctctgattcctttgctgtttggtaaatatttatatgaagatacactagctttaaaataagtaatttatttgcttcatggaatctgtgctaatttgtttccatttcatacaagaaaataaataacaaaattagttaaatagttccatggtacatatttagtttttgatgcattgacagactttgactatagctagatcctatgtctacctttaatggattgttgtattttggtggaactcttgactatttctttggccaagcagaagtgaagacttgaattaagaaagtcttagtatgtcttttctgggtgtggaaacacatgcctgtaatctcagcactaggaagctaaggcagctactacaggcaagaatacaaataataaaaaaatacaaaaaaaccataaaacatgaggcttgaagtgatgtttagtgtagtcatcttagaatcttgagggaaaatttcaagacttcccttgttcttatactgagtctagttgagtgattgtgaactcaagtaagtctctcttgatttttccatttccaacctctgtatgggattccaattcaccttgagtttgaatttgttttctagaaaaatcttacatctctgatatgaggcattagatttagatgttctagactagctaaaaaatgcatctaactttgtcaaatgacttttttgcaagcttattttgactcaaacaaaagattcacttatcactccatctttcacttatagtttagagatttgtgaagccaaagcacttaactgagtgaagtgagactcagagtaattattgcctttttaaaaatttgtttatttggataaaaggatttgtattaaacatgggatatatgatcacatgcacagacataagtattccaagcatctctgaatacattgttacatgacatcatgtacttatattggaactataatgaaaatgaatgtaagttataaaaagaatggcagtttaaggtgcagaagggaggaagagccaagactgtggaaagaggattaagctcttggggtatgtgtgaagttctcaccacaggctcttaagtgcttgctaggtttccttcagagaactattttgactcatggtcaaactggatgataaattagcttagatgattcctagaaaactctcatccatagaagtctatgggagttctctgtttttcaaatatcattctctcttacattcataaaacatagataatctttgaacatactcatgtgttccaagtatacatttgtcttttccatttaaaatataattaaggcctaaaagtatctcttcttaacaaataaaaagtgtcttttcaaaagcaaatgatgctagaaaaatggtgagtcatagaggataaggtacacagtgaatacaacacttgacatgttttaaaacttattttgttttcaatgataaagtattaaaagagatgctttcttgccatagaaagtgttggagaagcatcttattagaaaaaggattcagtcaagtggaaagcccaaaggatgtaattacacatagattaaagctccgaggccaaagtttcttgatgtccagggatgcacagctagtgtgaatgtcatgaacttagatggctgcctgccaacctctcttacaatttgtaagcttaatgcttcttggtaatgatccaacaaaatgataaaatccatttatcatgctgtgggtatggtctgaatagtttgcaaaagctacttgttccttatatacacatttgttataaatatgtcttagtttattagttattagtttattcctcaagccctcatggcattgtttgtacaattatttaaaaaatacacggagatactggaatttacaatgagactttctagacaccagggaagcaagacaggagacaggaggggaaataatcacaatggtgcaatcagaaatgccagtagggatgagttgcggaaaaattctgtctactaatagtctagataaaaccaaacttggacacagatggctagaacaggaataagttaaaataaccagtaggtccaatccagcacaactgtttcatattctatgacccataaatagttttacattttttaatactttaaaaaaaaaaaactccaagagtgagagaactagccctgccctacaccagctatagcacatggggagtgagccctacaccccatctggacaccacactagagctgaccctgtcgtctggtgctcaggggagccagtcatgagggcatgagagcaggggagttgacactccctccccttgtatgcactttataggaattggaagagaggacccagcaccttgcctggggaaaacagtagagctggccctggtggtgtgaggtaggtggctgggatctgagatcctgagagcaggagaactagccctgctgcctgatgcaggattcattatgtgagctaggctgggaagtactggagagcttgcccaggcagtgataacaagggaaagctggtgggctgaccaacccagccaccacctaggcccagaaccaaggatctgagttagctcaccccaacatccacctcatctatgaactgctggaacatgtgaaggggatgagcctacagatccaaaacagcaggatcaccatgacacaggacagcaacaggatacccctgagtagccccaatgagggcctattatcagcggctagcagaaactagaggccttgagccaaagcaatgactcctggcaatgaacactttcaagtaaagatgagtggactaaagggtaaactgtgtgactcaatgagccaaattacagattccacaaggttctatacacactctctctgtgtctctgtcactgtctcttgttttgtttgggtttttgttttgtttttcttttaaatttggtttggtttgtggggggggtgttgcaagggtaggggcggatgtgaggagactggaagatgagtgggatcggaatgcttctgtgaaatgcacaaagaatcaataaaagttcaaaaaaacaaacgaagaccatttcatagtatattaaactcaggttttggtgttttattggagcacactcacctgtatttaattttctatgattctttccaattctcagagcagagatggagtatttacaccagaaagtgtttggcctttcatgtttggttctcgtatacaaaaagcttgtcagacttttactagcggatcttgaaaaggtggaaattatcattagtagacggtatgtttccttgatttgattggtagtcattcagccaatgcttgtttcaagtctgtgacttggtttgagaacccaatttgctaagttagaatgttggagctatcatgggctgtttgggataacaaaattcaggaatggtaactagtattggtttgtcttgatgacttagttaggtcatgcattaaactttaactgtagtagctagcacctagcacatgctgagaaatcaccttcatcattattataaacagcagtggcagccttatgagaggtacagaacaaccaggacatcagggtacagaaagctcacccagaaagggaagacccgaatatacactcagtgctcaccacttatcaccttgctacctgcattccacttcctcttattgtgcctcgtttctgcttccttgaaaaatactagagataaagagattagagggagggaggagtgatttttgcctcctggttagagttttatcactttaccattactttggatgtatggtgtactactgcaccatggcaaaagtgtggtggaaaagggtctatttactgcatagtgtctaggaggcagagagacagatgggaagggaccaaggtcttcatggcccattggaaggcaggctcccttgcctttaaatttcttccactgatgccatctcggagggtttctatcaccttccaataatggcacagatgaggaactaagccttcaacacatgtatccttggaggatactatccaatcacatcagcccacaaaacactataaaaatagtggtgcatctcactattgttcaggttagctactccactcctgtgtctgcaatggagcctgctcccttctggctgacatatgttcattgtgcccaagtggatctgacccatgtctgatgcaggggaatctttcctacttcaatgttcattttccctttaaaatgcctcctttgctcacaggcatggagttgtgaatttctttagcttttcctgactatttaagttgaaatttgttttcaattaggagttcattttctcctgctgctcgtttcaccactggagtcaaggtccagctggtgagatcagaaacaattgctataggaaagcctataatgctaccagtggtggcttctgggtttacatgttgcatttaacacgccatgggagacttaaaaggaggacaatatataaaaaatattcctctcatcaccactccctaaataccacatattttcacactgttatttcctggaaaaaatttaagtatagccagccggtgatgcagcctttaatcccagcactcgagaggcagaggtaagtgcctggtctataagagctagttccaggacagccttcaaagccacagagaaaccctgtctcaaaaaaaaaaaacctaaaaaaattaagtatagaggaaaagatggcatctataatcccccttcattgtgagacacaaaacttttgcccctcatcccaccccatgtattcagtttccagtagctgccaacttatagtagaagaagactggtcagcagaaaacctttcttgacaatacttttttatttcttcctactccatcctactccttcatgcccttcttcagctagaggccagaaaccagtgttaactctagcttaaggaaaaggatctattgcacgttagtttggaaagtccaagctgtggtccttgtacctatgatcagccccaagcctggcacaggataagtgttcaagagtacctgaagaatgcatgttaaatgaacattctccataggaacaccacaactcacattaacttttaaattgaagtcaaaagaattgtagatggtaaagcccttctctgtcaacatgggttttcatggggttcaaattctgtgactactgagtcactctctctagttggcagttagcatgaatactcttatagtgtgacaatcggttaaatctgaggctttgtggtcacaaaagtgtccctggctttgcttctagtacggaatcaagctgttgaaatcattcatcttgtctgatatatcaattgtttaggacctgaatgaggaagttggttctgtcttctgttgctaaagatttgctaataagctatcagaacacttcagagtcctatcaggaagtctgtgcatttatttgaaggtagtttgaatcataagtatgtggttagcataaagcaatcagaatatggcaggtttgctaaaaagccatgaaactccaaattgtcctgaaacattgaaatattacaattatacaatactccacagaaagtgatgggtttgcttaactgggctgctggcacagaataaccagagggttttaattgtcatgtaatgagtcagaagcagaactaagggtggtttttactttttgtatttgcctggcaatggaaaatgaaattaatgatcattgtttatagaccaacaccaacagggtaaacttttcactggattaactcaactacaggaaaaaaatgcaaatgttttaaaatatgaacctttatagccaagacttctgaagtattttacagtacgttttgttaaccacacttaaaatatcttgttatccttagataacagatgacacttgagcttagtgaaggtctcagaacactcatgttttcttagaacttgatttcatggattatatatacatgcatgttggcaataactgttcagaaccatgggagtttagtgaatgaaataagaaacccatgatttttacgtttatgtaagtgtaatactctgttgatcacaacagacctgattgcttatgccctgtacccccaaacctggagacagcactattcaaactcctaaaaactaatgagaacacaaatggtctatcccatatacctatcatacttattagcatgttgttctgccattttaatagttatcttccctagaaaattttaagcaaagcacatatcatcatttttctagctgactattgcttgctacaactatgactttttcatttatttttaaagtataacttagtggttagtgtttaagattgctgttttggtccatgcaataaaatctgtcggtatagtctgaaaagtgataaacagacaatgtatcaagagttggtatctagtctgagctcactagaaggaagttctatcagttgggcacccaagttagggaagcagaatcatgtgggctgtctcactgacagccctgtgaggtcaaagtatcctagttacaggtgcacgcatcacagctgttttgacaactcgaatccattatttcatgggctagtataccacactgaagtccaaaaccaagcaagaatttctcatttgtgcggtactttgagcagtgtgcctttatccaagctatttaaaagatcaatacttataaaactccatttcttgcaacatgcatcccttaactgttttgtaagcttcagcatattaagtggcacacaaatgaaaatcttgtatgcaagatgtcatttgactttgctattatgaggaatagctttttaagggcatcgaatccttttaggttttttttttttttttttatctctatttcgggaaatcgttagtccaaagctgtctattgctcaatatgcacagtcccttcatgacaactagttcatgctggctgagaagatggggggctcagttgacatgaatttgttggggcttatatttaatttctcccagcatgttaatggtttgaattgatagacagcgttatctttctgacacttcaagagacaatgttagaaatgtcttcctttcatgtaggaggagctttagtaggcttcaaaggctacctttcttctctttttactcttctcaacttccaggaaagtcatgggtacagatacagatgataaaaaggcatttatttcatgtttctgggggaaagattatgaagaaaccactatttggttcatgttttcaattttgatgaaactgtactcaaagttgaaggttgtttctttctgcatcgcatcttggatgaccatacaccctgctatacagggctccccagacaaactgcagaggtttcttgttgcaaacgtaaagaagatttaattgtgtaagtctttttattaggattgtcaactttcttagaatttttttcctaaaattttgagcagtccaccttttccagaagttctctgacagtgtgcaaactttttgatgcaaggtcactcaagaatgcatatctgatgccataagtgtagtctccacattattattttctaatgacaatcaacattttgaatgcttcataattggtattcaaactttaaagaacacaaggtgaaactaaagattaggcacaatgctacttgtctgacatgtacaaggcctggttttgattttcagcaccttaaaaccaaacaaatgcattccaatgggggtagtttcagagatcccaccattgggtagttattgtacgtgtgaagagaacaagctaaagatgctttgcatatattttacatcttaaaacactttacatcacagaaatctagacttataatttgactttttctctgaaactattacaaccaatattgcaccaatgaattcttttatatccagaaacaaaatttgttctttcttcttttttcatagcatccacagcaaaactacccattttcccattcatgttcatagtcttttgtctgcataagacatacccaggcactctcctggttcatacattactagctctgaaagaaagaaatatgaatcctgctgaacccagagtttcctgcgtgatagagacatgcagtgcttttgagcaacaccccaactcagaggaatttaggggaaaatttaagccaagcaacaaatattagagcttttaaataatatatagtattggaaaatctataacaacctgagggtgtagctcaatgatagaattcttgccagaactggatttaatcttcagtaacagagcatagaacaaaaaaaggtgtaagtttcatagactcaaataccaaaaaaatcctgcttacagtatatgaaagaaagtgtgtgtgtgtgtgtgtgtgtgtgtgtgtgtgtgtgtgtgtgtgtatgtgtgtgctaaaattagggacaaagatcataaatgctgccagttttttcagggtaaattgccatatgaaggtctttgagtatgttaaggaattggcagtttgttgttgttcttgttgtttgtcagttacatgtctccagaatatttttttgaaatgattaaatgtgtaaaacttttgaatggaagttgaggaaagtgtatgcaaggtacataaattagtaaggctcttgttttgtctcaatacattaaagcacagtccaaataatttagacttagtggagttatctgacttacaatgagggctacagtttatgagcatggatgctgctatgcttcaatgatggtgtttgctcaacattgtcaaatgctggcattctaatcacaacagctacagagtcaaacatgtgatggctagaagagattgcataggccttttagtgaaacactcatttttttttcaggtgagaaaattagtcatgttaaatagggcatgctttgcatgtcccaaacatttgtctctttactttgtgctctcagtagccccatagcatctaagtttctcagcaaaccgatttcaaaagatgttactgtatacaatagtctcttggttacataggagtagagttaggatttaagccaagatggactaaatgtgagcataattcatcccaggtgccattcagtaattaacaaaaaaagaatggttgtagtctgtttgacagaacatgtagtcagcatgatgtgagaaatgtgtacatgtatgcagtgatagactgtattggtcagggtcctctcgaggaacagaactggcagaatgaaaaaatacatgtgaacataatatatccaatgtatgtgggatttattagagtgactgacaggctgtggtccagcttaatccaacaatggctgtttccccataggaagcccaagcattcaatagttgttcagtccacgaggctggatgcctctgctggaagaagtaggctttgtactgctgaaggtacgcatcagcagcaggacacatgaacttgcaagcaagaatgaggcaaggaggcaaaaagcaaaagcttcttcttccatgccctatatataggctgccactagaaggtatggcccagatttaaatcttctgacctccctcacaggtgtgcccagctgtctaggttcttatttaattccagtagtcaagaacagccatcacagggagtaatccgtatgcttgccttgggagataggagaaggctgcaggtaagaagctagtagacgcctctttaccaggtaggcaagggcatcctgtctgtggaacctgtaggtgggtatcatctgatgtgttttaatactagagatggaatgtagaagagcatgtttacagtggtattcagtgcatagaattggacttaaatactgtccaaatgctttccttttagtttctttcccttttagtgctagggacagaactcagagctgttcacacattagtcacacactctgccatccagtgcagaccttagaccatgggcactctgagctcctggtggttttattcagccagttgagtgatatccggatgatggtgaaagtttgaattaggttagtagtcataggtactaaaaagggattggaagtttggagataaatctggtttatctccattaaagtttaagtaggtggaagtaggctcaatgagtccaatactcctatctgaacaccccccaggatccgcagacactgctacataagacaggaaaagctggaagtgaagggactctaatggcttgctaacttcatttcttattgccaggtgtctcagtgcaaagaaagtaatatctataattcacattaggcgcaaacagacctatcagagattaaagaccataggattatgcatatcaatgtttctatgagtctataaatgcttgtgtgggatttcttgtatctgagttcaaaatcccttagtgttctgtccactagcttctggacaagatctaatcaaactaaaaagagagtgaaggctcttattttaattagctatcattattactactaataacaattggacgtgtgcatgtgtacatagaggcacgcctttatatatatatgcaggtcagaggacaactttcaatacttgcttcttgccctgcaccttgctgagtcagagtttcttgtttatgttgctgcattgcctcaggctagctgcctcttgagcgtctgatccgttatcctgtctctcccttctatacgaaggtagaatagctgggattacagatgtgtgccacagcatctggcttttcgtgtgagatacagactcatgcgttgaaagcttttgtctgctgagtcagctctcagacccttagctctatttttaaaatagggaaaactgattatatagttaaacaaaaattttaaaacttgaattattctgaatcaacacctattagtccctgcccaccccccaccccgaaagacagggtttcgctgtgtgatagtcctggctgtcctggaactggatttatagatcaggctggctgcaaactcacagagatcctcctgcctctgcctcatgagtgctgggattaaaggtgtgtgccaccaccattgtcttcagttttcaccagatcctctggatttatttaaatcaccttcctggtctagtaagtacctgcatattcaatgtattgatttaattggggaggggctatatactgtggcctttttgaaacagaatctcacagtgtagcccaggctgacctggaactcagtctatcataggctggcctcaaacttgtgacagtcttcatgacttagccctcatgggttggattataggtgtgagctacctaccgtgcctagcaaatacaattacccatgaactactccagcccttattatttaataggtgcaaaatgggattaaatgactagataggcagtctttggggaggaaatatatgaagggaaaagcagaaataattctatactatctgcttcacatcagctagatagctatacaaatatatccacataaataataagttatgcgcatataaaatgtatttgggaggagggaaggatatttttctcttctatccctaccaaaaagaaaaagaaaaacaagaaacaaaaggctttgtctatatttctaaatagatgttccagacttactcaggatatattattgtccacagtgacacctattggtcaaatgatgcaaaaacaatatacagtcactggtgctgtatcctcttaaatctccttggagtttttcaggcagctgttagaaagcagattgtctgtgatccgactaaaataggaaatgaatcatgtgtctcatgcagagatgctcaattttgtcatttagtggagatccaaataggatctaggaggcaggatatccgacttccctagttcatagctctgccaaaaagaaaaaaaaaatggctctgagattgcttggggttctaagcatttggagcatctggctgttactcccatattggggagcacgtgggatctgtccatgtgactgctgccttgtacaaactcaagctgaagtgctgagatttttgaagcagtgttctctcaaagcctttgtgaaatcacagttattagcaaaggtgttgggctggccgcataaatgtagtttctaaaagttagttttatgagaatagtcaacatagtttccgtctctttgttaaactgtaaacacctctaaacaaggatgttgttttcatggaacaaaaagttaagtgccaaggtacagtatgctgaatgtctgaaggagtaattggaatttctagctcttattttcttttttgagacagagtctcactctgaagcccaggaaggctttgcgcttatgcttgctgtcctactgtgctggccactcagtgcttgaaaagcaggcatgtgcctgacttgaggaattaaatttcagttaaaattagaggtctaacaaataccatgacctctcccttcaatagtgcctatgtgctcatataacatacaccaaacacccccacactagacatacatgaagtaaaagaggaaaattggtaagacctccctcttcacttctagattatatatgctaatgtttcttatttgtgctaaatgaagccataattgagtcagattccttcccacaatctaaacatccctagtttttataggacagtgtatattactggtaagttatgctcactttccactttctgtttatttgatctctaggtagttcttagaggctgggtacactaacatcacttttcctatttagagatcaggtggacatcctatgtaaaccactagaacaccacatctgtggtgttcatggccagaaagccaaaattatctcctagattccttagctcatagctgcttctaatcacgtgagtttaactgtagcttctgtgtcatgtatctttttaaattttatcttgtggctttggccctcttgattttctcttaaactatctctagtgcttggattcacccacataattaatgatgattttcccatctcaagtttcttaatcacatctgccaagttccccttccatataaaataacagatagacattctgaggattggagtgttgtctagatctttggggtctcactattctgtcttctacaaatgcttctggcaaatatattaaattaaataatagttaggtcactacatagaatgaaataatactttttgacattatctcaaataagaaagatttgatttctattattcattctattctaaattcaattaaaactcaatgttgaagataattgttcggagattgatgatagatttagcagaatagtatcatgaaaaaaatcttacatgattagggaagtcatggaacagaagtatctgcaacaggctctggtgtttgatctgctccaaatggaattacaaaaataattaaatattctaataaataaacattttcatcagttttttgtagatgcacagagagaaactgaacaaggtcatgctatggagctgacattgattaagaaaaaactggatgcaagctccagcatagtaacctctttctggtatctataatagttgatattcattgtcaagttgagagcacttatgatcaccatggaaacacactcctgtgtgtaaatgaagaggaatccacctaagtacaaacagccgtatcccatagattatggtctcatgctgagtaacaaggagaaccctcagtgctagaattcttcccccttagctttttggctgtgggtgtattgcaaccagttgtctgtcccaaattccttccataattccttcctcactgtgatggactgaactcataatgtgaactacaatcagctttcccatccataaattgccttggccaggtattttatcacagcagggagaaaggtaattaatgcactgtccaacatcagtttttggaggactaattcatgagtaaaattcaatttccttcattggaattcaaatgatttgtcattggaatgaataatggaagcattagctccagttttgtcatcagtaacctttcacccacctattgaaagtattggaaaatcacggttattaaaagcaaagatcacagtgcgtcatagaaatttattcttctaaaattatggaagaaactgaacgaattaaaatttgagtgctcacatttttatgtaagtctaacttttgaaaaccctactttgagtcattaatttccagaaagaatcctttcatgaagatcttgccctgaatttgataaatttatattctggtgttattacataatataaataagaataaggggctttgattttcaaaagagtgttgtaacaaaagaatttatttggtgatatttggcttctgaaagtatctattaacaaggcatctttagagtagaacactaagaaagtagtgggaaaatatttgaatggcagcattttcacagtacattgaggaaaaatagaccaaaatatagcctacattttgtagtcggttcttatccatcctggcacttttgtagaaagggtttcttcatattggcacgacatagaagagttcgttgaaaatgtcaatgttttcaaatttaacgagcttagattttggtcaattttctgaagaaatgtttcaatgttgtaataatatattgaataatatattattctgaaaaattactgctatacactaaagatgcatacaaatatgagtatcaggtatggctatgtaccaatatttaatacatattgacattttacctttatttaaggatggaaaatgatttttgtgaaaattgtttcatagctacaagctgaccaatcaaaagagagtcctgattttatgtaattaatactttgagcacacttttgtgttctccaaacattctgggtcaacttgatcaatcatattattatcctgtgcatcaaacttgtagatttatagaccctggttcattgtaatctcttactatttccataagcagcttagtgagaaaccccctgatccacagaacctttcataatccctttctctgtggcccatggaaaattctcttaggtactgactttagtatttgtgtgtgttgctttattttattattttaaacttattttttattaattctttcagagtttcacgtcattgccccaatcccactcatttcccagtcctttcatatttgccctctcagcttctaacctctcccccaaaagaaaactaaaaattaaaacaacccctctatcagttgaagccttctcttgcatcagtcaaagctggcatgtctccagctcttccatacttgtaccactctgctcttccgtcttccctgcccctccatcacttattcctttgtcatactggcattgggaagtgtcttgtgtcacacagtgtatccttttgcccaaacagctttacttgcaaatgttccttgtgtaatgtattgatcaggttccaagcctttggcgtgtgatacaccatcaatacaatatcctctaggatattccactgttgccttgagtcacagagatcctgccgctacagtttggcaggactggccacttcatatgctccagcagctcatagacaggttaaacgttggagtggaccaactcaagaccctgcatctgggtctgggcagtagctgaactggtcagtctggaactctgcttggactctcctcacaattgtccttttaaatttttctttccatatgtggcatgatttgttaaccatatgttttcctcatttcttactcttggtggcatttcctactaatgtcattcctttgaatactttgtgcagtagacaccataccttgccttcccttggttcctttggtgcctactaggaggagtcactgatttgcctatgttgtgactgtgactgtgactgtgcatttgtctgttcagcccaatggtgcaaagacagaggttcaagacagttgaaatctctcatggctgagctcacctagttttcatcagtctctatcactgtttcagacatctgttgtctgtggatctcagcctttcctcacctgcactgtctttatctttcagacttctgaccacttccctgtatcctccaatggcttcaatccaaagcttttagctttgacatgtatattaatttatgtcctgttgatttcacagccttttaatgtctacaacttcctagctcagtcttgcttttgctcgggaggactcctaacatcacaggttttacaattctttttcttccacagtctccttcatcctttcagctccctcttttccacccagtctttccaaagttctcaggacctcggagctttggtgcatctggtttcctgggacatcatcatgccttcctttgcattagaatcctggatgagtctgtgtccttgtgaggaacagaaccaacagaataagcaaatattaatcagggatttatgaaactgacttacatgatatggtctgggttccaacaatggctatctgcacgctggtgatgctgagaactcagcagctgctcggtccatgagaccagatctgatgctgaaggcctgaagtgttcctgaagagctactggtcttcggttcaccttgaaagtctaagaagttggattttgatgtcaacagcagtggcagcagtagggtagatgaagtctctaacaacaatcaaatgcaagcaggcagaaagcaaaactttctccttggacttctttctatctgggcttctatcagaaggtactgcccaggtgtagagtgagcctcaccacttcagttaacacagtcaagcacctcttcacaagtgttcccagaggctcccctctcagttgagtgtaagtctagtcaagctgacaaccaacgattagcgtcacaaactctatcaaccaagttcactgattctgcacaccacatctgtagagatctttgtctgttaaacctcagaataccatgtagtccaaggatctgcttggtcacttaattctgactaatacagacagtccatgacttaatgatagtttgactgaattgttttttattttaaaattatttgaatgttttacttgcatttatttccatgtaccatgtgcatgcctggtacctacagaagtcagagacagcaccagattccctggaacttgagtgacagatgtttgtgagccatcatgtgggtgctgggaatcaaatccaggtcctttggaagagcagccagtgctcttaactgccgaaccatcacttcaaagccattaagttaatgagtttttttactctcaaatggtgcaaagtggtatatattcagtagaaatcatatatcagttttgaattttgatgttttcttgtgctagcatcacatttgacaacactgtgctggcagaagcagcaggttgtgactcccagtcagatcctgtgttgtatgtttttacatgtgtatattcagtgattcacaggattagcagctttttatcagacataagctcttgtcttttctatgagttttctggatcttagactagtggatttgttccaggtaccttacaaggaggctaagctgaactatgatgttcattcagtaggtcaagtgtattgaatgtgtattttatttaacatatttccacttaatgaaggatttattgggttgtgacccccattataacttaagggaatttgcacctgaatccaaagggtttaactatctattttgtctttatggttttgttattcacaattccagcaattttgacttcatctgggaaactataaaaatgcagacctataagtagaaaagaatttatcagtcatttacattattgttgaagaaaccctacccagagtgtcaagggactgaagccatttgcagggtcttctctgcccctccctggggagaccagaagaaacctggagtgagtgattggctgcagatgaggtaggcatggcaaggagtagcagactatgggtcacctggatgtgctagattacagagtttatgtcaagtgacaagttgctaagcaccagtacgcaaaccttgctggagtgcttaccaaaccaggctgattcagtctctggcatcatgtgtcacccttatccttgcttgtatatgaaaacctttgatgctatcacagtaactcagaaggaagaaagtgcagggcttattaggatgtaggcaaacttcccccttgctctaaatcttccccctctaaatcttttacaagaatgaatcatcagagactctgaatattactcagttttcttttttttttcttcttataattttggagctccttagacactgcctattttttattttaaaattgatggaaaagatcatccaaaagaattattgtagatcaacaagagaatgacagacaatcctatcaaagaaaatggagaactagaagtgatgcatccatcactcaggagagtatacagaattaaacaacctacaaacatttgttcataatcattacttttcagcgaaatgaaagagtgcaaatgaaaaccacagtgaaatacatttatttcccttgcagtgactaaaaacctagcatcgcagcaaggcattagggactgaaagtggatagtgggagcactggtcctgctggtgggttgaaagttgaagcaggcacttcaatacacatggttgaggattgtagctcagtcctcctagagtgttctcttaacatgcacagagtcccatgttcaaatcccagtaccataaacaaaacaacaaactattttattaggaaataattttaaatttagagaaatttgaaaacgtaaaaagtagtttagagtagtataaattgtaactgtgtttttcttatcaagataacctatacttaactttgtttgtaatttgatttgtttactcctctttatagaaacctatttatatgatattatttttcttgattttactcagcttcaatagctatccatcttttatcatccttgcctcatttatactatttatatttgtgctcactggtacttttaaaagccatgtcaccagatatgttgcatacataaatggaacattgagcaggatgttggtggcacacatctttaatcccagcactcgggaggcagaggcaggtggatctctgtgagttcgaggctagcctggtctccagagcgagtgccaggataggctccaaagctacacagagaaaccctgtctcgcaaaaccataaataaataaataaataaataaataaataaataaataaataaatggaacattgatgaatctcacaaacataatactttgtaagagaggaatagataattttggttcaaaacatggcacagaggtacatggtgccaaaaatagttactgaaatttataaacacagaaaattgatttgaaggggcgaggccttgcattctggcagtttttctttttctttttttttttgccttttgcaaaaatattgtgaacactccaacctatggcaatttagaaacataactattgagggatatttccccctcctctctatctgtagaagtaattacttcaggggttggtgtgactgtcttctgctaatgagtcaagtcgccagtgtcacagactgacctgaatgtctctttatctcttttacagtcttacaggcagtcttcatcctaagctatactttatttctcattgcattaccgtattactgtgcaataaaaatgttcaattttgtcatagacctgctgattgagtgttctgctttgaacaaaattatcactaaattggaccatgaaaggaccttcttttaaaattacacactatttcacacatgtaataacacagttttgaatccattaatgaatctaccatctatatgtgcctcattttagcacttcacacattgctgcaaagccttggtacattaaataaatgaacttctaagtgcagaatacttcacagatccttcttttctgtcttattattataagtaccctctttgttctttattcctccctaataaaattctctagaagttattgtgcactttacaatggtttttatgaaatatagaattaatggatcattttttctttataaaaggttgtttccatgtgtggttcttgctggaagagaacttgctgtgtaaactaggctagcctaaaaatcagacaccacctccctctgatgttcaacattttttcacaaatgaatatatacatatacatatcctatttatttttaaatatgtgtatgtgtgggggtgaggatatgcacacaagtacagatgcccacaaaggcattagattccccctggagttagagctgcatatagttgtaagatactgcttatggatccaggaactgaactgaattgggcttcaagagtagcaagtgttctaaactctgggccttctctctctcgagttgtctctatcctttggcatttgaccttggcacacaatcactgtctttccgatacacaaagacgaccttctaattgtaatagagcattgcattttgtgactattatctaattctatattgtctgtaatattgatagcaatatgctgttaaaacaatggtgcagaagctaaatttgaactgggtgttatcgaagcctctccaggtgtgtgctgcaagatgaaattgttaggctagatatcctgtattgtttgactagatctttatttgcatgtttcccagcaggaaatagttctcatttccctctgtgccctccaacttttgattctattagacatttgagttttggttatatattacttaatattaagcaaaaaagatggttgacttgcctcatctatattttcatctaattttacagtgagaaaaatacagtttcatcttattgtaaaaacctctaacctatccttactgctaggtttacatgttgagtcttacacagtatcagtcagttaagggaacttcccaatcttaatagcctcttttgaaatgtttacagtgtgggattttgttgatggtgttctctgaagtttgggttagttctgttttgtgttttaagagcattttatattttttgccactccaccagaggtatgggtgatgctcacaacactttcaaatatgccagtgaatgctcaccctctgaggagcacaacaagccatcactctgcaggttaaagaacagggacacagggatagaggttgcttccctctagagactcccaggatgacacccacacagaacaataacaattaaaagcaacagaatcaacccagtgacagactagacaagtctctgggggcaagactgcacttgaagaagggtgaaggctcaatcggtcacacaaaatttgtgacttctactttgttagaacctgggggagcttgagggcactcttgctataaacccccatgaagcaatgtgcttatatcccagcaagccatgctcagcagggtcctcactattcctccacagttcttattaatcccatgttgccttctggatatttggtaccacactcattttctactcagtcacttcttttcaaatgtggacctttcttctccatcgaattcagacaggcgtgactgaagcacagctttaacctatgatagtcttatgcatggcctctcactcgaaaactacagggacagtactttcatcccaatattcattcattcctttctttctttttaagttagtgtatgtcagttataccaaataagtttcagtgtgtgtgtgtgtgtgtgtgtgtgtgtgtgtgtgtgtgtgtggtataacaaatctcaaagcaacagtgctctctgttctagtctcatggatgcaaaaccagctgggtcagctgcttgttcatttacactgacctttacttttcatggtacacctgttttaattagatgtaaatatcctttctggaagctatcaggcttacctttatattgcattggtcagaaccatacaatatacccaactcttctcttctctaaatagttggcggagggttcagagcagccacagttggttagagcaagaactgggtaattatagtccacatatgtggtctaatgcatcagctgaatgattcagaggctaagagtggctgctaagatgggctcttaaaaatgttaaattattggggaaaagtcaaaagaagagtctgtttcatggcacatgaacattaaaatagaattcaagtttcagtctgaattaataacatctcactagaacccagagagggtggctcacgagctgtcatttatattgtgttataacgacagacatttacagttgtgaatgaaatcatatggactgcaaaacggaaagcatttactaattagccatgtatagtaaaagcttactgaactccggtttaaacgaaactcttaatctctagcaaagatctgctttccctgagcatgatgtgtagccaaggctgaagaatgaaatcgggtcactgttggcaaagccttgggtggttatgactaagtgaaggttcacagtaatgctagccttatgtgcaatgttatggtggccaggttgtttcccctctgctcctcacctcctctgcatgtcactcattctgtctgccacgggatccctggctgtacatttataatctgtgagtccctatgaaatctgcttggttgattctgagggtcatgttcttgtggggtccctgatccctctagtgcttcctcttcctcttccatgggattccctgagctctgcctaatgtttggctgtggctctttgcatttgctcctattagttactggatgaaacattatgtctgcaattatagcagaatattaggagtaatttcactgactttaaaattcccattcctgaactatattgtaagaacttcagaaacctagaattcccttactgtctgcaagtattcatctcttgactgttcttttccgtccggagaactttaaccatgtgtaagccatgtccttttaaacttggaaatagattctttttttccgtacaatatattctgattatggtttaccttccctcaactcctcccagttcctccccatccaccaaagtccataccctttttttccctttcataaaacagataactaaaaagtaaataaagatacaataaaaacaaacaagccacaataggacaaaagagacaaacaggggggaaaaactgaggaaaaaagcacaagagacacatatagatgcaaagacatatattcgagctcagaacacttaatcccaaggttctaagcatctttcattttttcccttagctatctctcaagagccttttctctgacgtctccttccacctaatgtatattatcttctaaactgcaaagtaatctacatctcttactccttctctccttcctttagccttcaccctgtcactcccactctctataacactccagttttacatactaggttaccctatgtacctctggctggcatggcccagccgtaaaaccgcacaatcttcctgcctgagtctcttgaaggagggatcttaaacatgtacaccccccaactccccgtttgcttgacaccaaaaatcttattatcttctgatcctggattcaagcacagagctttgcaatggtagacaagtagtctacagtgagctaactcccagaactcatttactataataatttacagatccatccagctaactcaaattcagtaaacactacttgttctttctcctatgttgactctattttgagttttcatatatgtgtgcataggtgggctggggcacaaagtagaaagagcaccatgggaggtagaaaagaaggtgacaggagaaagaataggcagtgggtaattggtacgcgtggcaataatacacatgacacggagagggtaaaaatagagtagaaaaatacatgtgatgcatggcacagaatcagggagaagagtttgaggggagaatccataaaatactatgcattaaaatgccttagtgaaacctgttattttatgttaatctgaaaatagaaaagaacaatttacagaaaaattaaccaggaagtgcattgagcgaggatgcatgctgtatgagaggggtgcagaaaaaaaaaagctgaaaatagggagagctgttattgtaagagagaaagaggggggagggagagagagagagagagagagagagagagagagagagagagagagagagagagagaggagggagggagggaggaagactggcaattaccagggcttcaggagtagacagcaaaaatggtgggaaagtccttttagctctaaggagttctgctgcagcaggaggaggactagttatctgtagcagccttggaactaacatagactctgatctattggagacttgcttgagttcatggagaactaaatgtcctttgcagaggttaggaggctataggagctgataaagtaatggcttttcctggcaaacagaaactcaccttacaaggattctgatgaatgctgagtcagagtctagtctagtcttagttcagcctgaactaaacccagattgccatcttgagggcttgaaacctgacctgtgtatactaagcaagtaggagactgcacgggaggcccaaagaaatatatttcatgtagtggctgatgtgagacaagactttggacaagcatatggtcattttttataagaggaatgactcacagtggcattatgtaatttttaattgcataattcaagaccaatttgtaaaggctagtgaggtaaagcagcactaacaaatccaattgtgtaaccagaatttattattctcctcggatggggcttatattatatattcccttattttacttttttggcataaaatgatatttgagataattttttggctgtcctctctcaagtatatacaatcataatgggatagattgtgcctgcctggtaggattcttccaggaagcacatgccaggtaaaacctataacacctgtgggtgcagcatggtcaggtataacttgaatgaatgttagacaatgcccttaacaatcatcataaagtttataatcttcacatgccaaggtagtgtgggagtcattttcatgttaacaaaagattgtcacacacaaaataataataataataataataataataataataataataataatagaaaaatgtttaagtttcttctgggaagctaagtcccaattgtttagaatggtctggttatctcaaatttcaggttggaaacatctgatagaagaaaagtcatttcaagagacctggtagagggagtgggaagatggttcccattagagcatgtgtggttggtcacactacttgtggtgtaagcctaagtatctgcgatcagatcccaatccccattaaggaagccaatgtgtctgtgaacatgacagcaaccccagggctgtagggagtgaacacagaaccgctaggctcactggctcccagcatagctccagattcagtgagggaccatgtctcaaagacataaagctgagaatgacagaataaaataccagacatcctcctcttgattttgtacacacaggtgttcatctgcacatgcacatgcaaagcacacaagtgtgcatgcacacacacatgcacatacatacacaaaacctggtacactgtaagaagacacacgggatatactcagatctgttcctgagtgacatttcgtttcccttacacattattgttcatgcctcactggagagtacaggtctacaaagaatgaaagtcccacactggaatataagccaactacatcagcttcctacgttttgctaacattttcagttccacagcacacatggcatgattcattttgaattgcaataacacctaataacttgcttctcatggaactcgtctttgattttgagtccatgccttttattagacatactttcctttggttttcaccaaattagttcaaaatcattattaggaggttatgagaaatgaggttggccggtgagcaagaagtatgtatagattaattgaagaaaataatttcacatgattaactcaggcaaaatacagtaaaaatttagtagctgaatgggattcatggcatctcagagcagaagttgggtgtccatggaatttgctacagatgattacttttgaaatatttcccagtcctagaaatgtaaactcatgcaaagcaaatgtgtgaatggcactactggttctttaaaaaacaaaaacaaaaaacaaaaaaaaaaagcttggttttacttacatttacttatcgagttctctctctctctctctttctctctctctctctctctctctctctctctctctctctctctctctctctctctctctctgtgtgtgtgtgtgtgtgtgtgtcaggggtgggggagctgggggcatactcaagccatggtactcctaaaggtcaaaggacaactcatgggagtcagttgtttccatcaaatgggtcccaaagattgaactcagaacctcaggctgccagcaagtatctttacccactgggccatacagccaggctctttgtccttttataacattgtttcagttctttgcacatcagtttgattgtgagcttagagaactcacaacacatttgcctgagtcatactattttgtagctacatcttctctgtttgttatgtgctcccatttaaaggattttggttgtatcctctttgaaatgtgattgctattggtaatataaataggggaaaaatcaccccactttaagcaatggtattctgaaactaaggactaattttatgacttctaatttcatttgtgtgattcatatagtttcttcttttaagaaatatatgttccaaattgggagtcttcaaaactgttatttatgtaaaagagtaggagtcacttcaaaagagctatttcccaagctgaagtgaagaaaaatgctaaacaaacaaaaatacaagcagattgatgaacattttctcagacatttcggcactataggagagtagtggtctatgccagctaagaatattgagttctgtgtagtttaaaccagatagatggtgttgagctgtaatgttgcacactgaccagtgaacagaactgtggaatcacctgttttgttggaaacttcagtccttgcatttgtgagcttttctttcttctggtagcctctaccatacaagcagaaatgtctagggttagaaatgaagtttcagtgcagtagtttcagccacagctcatggcatgctaggacttccttgttggaagaacagaataaaaagcatctatcattatggacattcttccatggaagaaacagatagaaatgctttatctgggaagactcattggatcagttagtgttctctagtggagcagagatgatagaatgactatataagggacgtactagattggcttacacaaatttagtctagggagtctaacagtggctctctccatggaaaggctgggaatctggtagtttactcattccataaggtcagatatctctgcagtcccaagatggggatgaaagcttggaggattcctggagagccactgatcttcattccattatagaaggctaaattgccctgatatcagagaaaagtagcagcaacatcaacaacatgccaacaggaagacaaacttgccagcatgatgtaatgatctaagcaagcaaaactcttatgctattctttctcgggcttcctttttctcggctgatactggaaggtgccacccatatctagggcaggtcgtccaatgtcaattaaagtgaggaagagaatccttcaggtgcgctgatatgtatatatgcttaagtatctgtgtgcatatgtatctgtgtgaatgaatgcagacatatgctatttaatcctaaacatcttgactaaagttgaaattttcttcttactttgggctaaacccatataattattttcataccctatgatattttgaatctttaaaagaaaaggtatatttctacattgatgagtccattgaaaaaatttggaactctgttttcctatgtcctactggaggggttatcaaatagaaggcatcttttcaagttcaggaaatttgctggcaaatgaatgggtctagaaaagattatcctaagtgaggtaacccagacctagaaagacaaacatgattggtgcctagcccaactgtcatcagagagaattcatccagcaactgatggaaacagatgcagagatgcacagtcagacattaggtagaacatggggaatacttccggagacggggaggaaggagtgtaggaccagtggtgtcaagagcaccacaagaaaacccacagatacaactagcctgggctcacaggagctcatggagactgaaccagcaaccagggagcctgaaaaagacaaggccctctgcatatatgttacagttgtgtaacttggtctttgggtgagactcctaacaatgagagcaggggttgtttctgactcagttgcctaattttgggacctgttcttcctggtatattgcctcatccaccatggtggaggaaggggtgcctggtctcactgcagcttgatatgccatagatggctgatatccatgggaagactacctgtatccaaagagaaacagtagaggaagagcatatggggtgaggtgggggagatgggggggctagaaaaaggagaaggaaggggaagcgtcagttagaatgtaaaaacaagaaaattttacaaaagtcaagttgccttctgcatgaagtgtgttgcatgattcataaactgtgctttcctcactttttatgagaataaaattagtgagtagtttgtaaaaccagctggtacggggcacctagctcatgtacagcctacaagacagtgaatttctaacaggatttcccaagggttcttttctctcttattattttaagtcctttatttcatcttaaggaggtctttgctccataatgcaagaggtcataaatctccactgtactttgataaatcttctcattaagagagaggagcagtcctcttgttccacttcacagagtgacaaaaggaacagaaattttgaacaagaacaatcctagcgagatcattacccaaagcacctgatccttgagctcttgtgcttgcttcatgggacacttgttaaatgtggggagtagtaatattatcatgagtgtgttactcacgaggagaccaaagctgactctgaaaaaaagtactctaatttgcacatgtaacagagacagtgccaaggatcaaactttgtaggttgtattgcagattctaggattcggtagaggaaacatgatggcaaagcaacaaggacaataggtctttctgctcatcaacctgggtgcccttggatttagactcattcatgctggtccgtgtaatatctcatggtggttacttccatggtgatggtgaggctgatttaaagttctattcttcttcttctcttgactacatctttttatgcacccacaactctgactttgagaggcaaaagttttccatagagatgttcttgcaaagctaacttactgcttggaaagctttcctcatgacgtttggttggcctcagcttaaagtgtgaagaaatcacaaaagactgaataaggccacacatgcctttaatcccagcactcaggagggaaaggcaggtgaacctttgagttcaagaccagcctggtcaacagaatgagttccaagacagccagggctacagagaaaccctgtctctaaaaaccaaaagaaaaaacaatgattttaaatccaggaaactttagcctgccttcagcatttctcatccctctgaggggcacacagtcctcagcctcctggcttgctaccctggctttcttcctagagtcagagcagaggcgctgagtctgcattctcccttccttagagtttagttgacaagacttggttacagtatcttacggagtggatcttttagtattgccctatttcctgctgacaacacctccgagaaagctacattgattgatatttccttgtagtcccatgtcacagacaggtgtactcttgtaagctaaacaagatgtatccttatcatctctaaaaggccatgcgtaccccagaagacctgcagttagtgatgttattgttgcttctctgcctatctgagatcccctttgggcatttgtcacaggatatagtgcttttttttttttttttgtcttggctacaagggctactcaattcctcacccccgctgtgtgctccagtttgaaagcataaacttgtgtgactgaaaagattgccatgtccccaaggaaccttaaccctgaagaccacagaatttcagtgttacagtggtttctttacctagccctgtgtgctatatcacaccctctggaagagactaggccattggctggtaaattcttttaacagagtaagaagggaaggcattcttatttcacatggatgacattgatatctgttatttgagcttcaaattgtttctgtcaccatgacaaagaaagataataagttgaccatggagctaaagggaaactgagacttccatagtgacatagtgagtctcatcatgattttaaaaatacttaatgtttactaggcacacacatatatcaactctgtctgccaataattgtccatggtggctgagctgccattgttctgtgaccatcactaaacacttggcatcttcagagtccagaatgataatcttttgttttctcctgaagtactgacagttaagtcatccagagtagtgtgcttttaaacaaaccagaagagattccaaaccaatgatacacaaattacatcagcattatgagggatatggaaaaaaccaaggcagcatgactcctccaagagatcacggttccgcaactgccaaactcaaggggaaatgcgagatgaagatttcaaaagctttttggtaaaaataatgaacaagcaaaagaaatcagtatgggtgctggacatagaaaagtcagcatcaccaagcctaaagtcaacagaatggataaagaagccagcaacatgaaaaagccctctgcatcttggtgacagttgtgtagcttggtcttttgtgcggccaatagcagtaggaccaggatctgtacctgatgcatgaactggttctttggaagttattctttatggtgggatgtcttgttcagccttgatgcaagggtggggggagcttggtaatgcctcagcttgatatgccatgctttgttgattcccatcggaggcctcaccccatctgaatggagataaaggagtagtggatggcgaggtagaagggaagtggtgggagggaacgggaggagaggagggagggaaaagtgtggttggtatgtaaaataaataaaaagtgaataaaagtaaataaaataaaaaaaatttaaaaggtaaaaaaaacgaaattcagaaacactaataactcatgtaaacaggcaggaaaaacattaccaatagactaaaccagctgaggaatgagtatcagggatggagggcaaggctgatgaaataacacattaaagtatcaataatgaacaaaagtgaacatgatgatgatgtccaggaattcaaggatgcaatcatacataagatcacatgacagaagcaggtgcactgataaatctaaaggcacacagaacctattcaatgaaattatagcgtaaaatgccccaagcttggagaactagacacacaacacaaaaggcacctggaaccttgtctagatataaccaagagaaccagttatacacaccaatctttagttgtttccagcatcctgattcttcaacgtccctattaaacatacactgtcaacaaatgttgaatatgatagatatttttaaactgtcttaagtagacatgaaacactatcagattacgttcagtctaatcaagcatgcataggtgttgatgacattttctgtaacttttgtatattttttcataaaaatcaattctcttgcactttttgatggtattctcacgtggcttatcagagagaaccttttgcatgttttacaatccccactttcccttttctttaaatcactccagtttcccttcatgtcagtcattccctgatggcatttctgagagtgaattttactgctttcatctcctgttttaggaaggaaacccagtgcgatcagcagacgcctaagggcatttctaatgtttggtgtattcgatcttcacactcagttcccagcttttgtttctctgtggaagctgtgtggtccctcagccctgttttcccaagacagacaagtgttcctctaaacttttcagccttaataaacctagatttgagcaaaggtagaagatggaaagttttacttgggactgctatgatgttactgcgtttccactccctccaagctagctctgaagtgtaagtgtagctttggagcctttacatccaaatacaggttaaaggcattttgtcatctgtcattaggatgtgcccacaaagtatgccatctgttaaatgactcaccgtaagagaaatggatcatgtgataggctgttaggggttgaaacttttaaaactgagcgttcaagaaaggagccctgcctgtgccaagggtatgctttagctttagaactgcaatcagaggagagcaagcctgcatctggaaacattttaaatagacttttattgttatcactttttgaaacacaccaatttctatgactttaacttgatctatgggaaagtgagtgaatggataatctgtctctaactccagacacagaacttaaaatgttgttgcaattggttacttctaagacagtggctctgtgagtctcttcatcagaattctctctgtatactgctacatagaggcacactttaaaatttaaaattatatttacttgtggggcggggcgctgtaccatgtgacattctgtgtggacaacagagaaaaatctgcaggagtcactttttttcccatgggtccagggattgaagtcaggtcatcaggcttggtgacaatcaccttgacacactgagccatctcccaggtcttgggaatatactttgattccaccttttttgggggaggatctttgtttaaagcctgagattcataagaattctggtacaggttagttttcaatctccaatgcagcacaagtgccttcctgcattttaaagagcaggagatgaaaaagtttcctgtttcaacttaatatacagtgtttgacaaataaaagcaaacaataccagcaaggttttgggaataataactattaagaatagtgcagttgggcaaaatgtggcatcacgtgcttggcagcagggaattagtctgataaaagattttgctgcagcctattgccatgctcgggacttagaacagctttctgactacttaaagcactttcatcctttggtcttttattataagttcataaaattaattccctctagggccattccattattcttttccaagtcaagtcctagacaaagtgtgactcacatttatgggatagtgtaaagaatgatgcacatgtcatgtgttcagctgcattgttttatgatgggtctctgaaaggtgggagaggaaagtgccatttaaaatagaaaatgcattattgctctggcagaacgcatatagacattgggggcatcaaaagtgaattagaaaaccacatgtgtgcaactgtaagagaagagaatttataacatcaatttgagagactgtcttcagttcatcttttaattaagtttttaattactttggtgcatatttccaggtctagaatcaggtttatgaatactaccaaagcaaaatggcaacatagaagtttgccatcatatgatcatgattgaattttattgaaaaattgcaatacatattttaattttaaagttctcctcttgaatgcaccttctggggtcttggaagggcgggacttgtgattgtagacatttctattcttctgccttcttgttttatttggtcacaccacagtgtctttctttctctctctctccccattcctctatctctctaaatacgaatatgcatcagtagtctcaagttttttctttagtaagtgctgatggtttaaagaaatatctgaatgtctaaaacaatgtgtctcaaccttcctaagaaatgcatcaaccctttaatacatttcttcatgttgtgctgactccaatcctaaaattattttgttgctaattcataactgcaattttgctactctcatgaattgtaatgtaaatatctggtattcaggatatctgatatgtgacccctatgggattgtgacccacaggttgagaaccactggtctaatgtatcaagttcatttgggtatactagaaatccctttaatacatagtgaaaatgaccctacaaaagggtcaaatggcaaaatataacagagacatggttaaatgaataggtttagatgtaagcaaactgtactgcatgtttctttgaaaagtttgtagataacaatgggttttatacataaatgtttgttcttgactgattagcagagaacaactatgagaatcatttaagagacatagtaccaaaagagtcctgttcttctaactactgtcagagtaaaaggtacccaattattattctattttaaatttttgtcaatcaaatagaaatttaaaaaccctactaaatcaaaaatcctagtaaagaaacacctcaaatcaatgtaggaatctgagatttgagcaattcaaaatcattttttaacttaagttctttaagcagttctttaaccactcttgagtctatatagtaagcaatacagcatttgtctttaggtatctactgtatttccattaccatattgttttctagggcactacgtttactaagtattattatattactaagtagtacttcttatatacaaaattttgaatgaattttatgtgttcatgtgaatgcctgcatttatatatgtgtcctacatgagtgccaagtaccaacagaggctaaaagagaactttggatacactgtaagtgtagctgtaggcagctatgaggcacttgatgtgcaaggtaggaaccaaatcgggctcctctttaagagtagcaagtacttttgatgtatgagtcatcttctccactccctaaatattcttgtgaattttattatgttcaattagttaatttatatattttggaacaggtctcaatattcaactctggctaacatggaacttactatgtaggccaaattggtctcaaacttacaagatctgcttacctctgcttccagagtgctgggactaaaggtgtgcatcaccgcacccaacttagcggcaaaccttttacatatacacagtgtaatttctttatccaattgtctttcaatgaacactttggttataagataaataatcctgataactaggggaaaacctggtgacttatgctctgactaagtgcttcacatttaaaatttgctgggaggtttcaaatgttcaataagtatacacacacagacacacatacaaagtttattgtgatttgataagcattttaattaacttgattgcagtcatcatttcacatattgatatatgtatcaatacctcacattatataaaggtgcacatttaataatgatattcaatttgactaaaggtgaaaaaaaaagtgaagtcaacaaccttattaacatttatgccactttgggggaacttatagatcaaaggattttttgttttgttttgttgttgttttgtagcaggcttcttttaaatatgtaaatgctgtttgtatacaatattgttataattttgattgtgagcctagcctgtaaccgctgagctatccctccagctactctacctcagtagatctttaaaattctcagtatcaaaatactcaaaaaatactcaatgacaagagaaataaactctattgtgactaaatataaacagacaactgccattgaaccactgatatttatttagcatgaactcatgtttactgcaaaaattaggatttttaactatagagtatgacttagaaacagactgattttattaccttctttctcttgactaacatttatcaatagtaaatactaccctagtaccacctgaaatgttaatttattaggagtctaagactttaaagctattgatcatggtaagagatacaatgtacattctttacactactcaatatcatatgccctctaaacagtttagggaaagagcaagtgtaatataacagaaaactggtgtgtgactatcactctccctttaaagagggacagccactataaaaatgtaacatagtataagagaggagaaaaggagaaagtaggctagaaactattagtgacactaataaacacttttgtatttccaagtaatattctttatctgtgatgacttattttttgtttagaatgtatacttttattataaattcaatcttagctccctctccctcccctactcccccaccccccactaaacctactccccatactccttctgatccacagcgacggtaaggccctccatgagggtaccccaaagtctatcatatcatcctggacagggcctatgccctcccctatgtgttcaagctgagagacatccctccatgtgagatgggctcccaaatccattcatacatcagggataaatactgatctactaccagaggccccatagagtgcccaggcctcctcactgacatcacgttcagagatctgaatcagtcccatgctggccatcagtctgggatccttgtgctcccccttgttcaggtcagctatttctttgggtttcaccagcccagtcttgacctctttgctcattactcctccctctctgcaactgggttccagagttcagttcagtgtttagctgtgtgggtatctgcctctacttccatcagccactggatgaaggctctgggatggcatataaggtagtcatcaatcagggaagggaatttaagttaacctctccactattgcttagattgccagttggtatcaaccttgttgaaatctccctagtgccagatctctcctcaaacctataatggctccctctattatggtatctctcatcctgctctcctctattcttcccctgactcaaccttcctgcgcccccatttcctcctctctcctcctcttctccctgtctttttctcccagctccctcttctctacctcatgctcccagttagctcaggagatcctgtctccttcctattctccaggggaccatgcattcttctcttgggcttctccttgtttcctagttcctctagtggtattgattgtaggatggtaattctttgcttcatgtatatatccatatatgagtgagtacataccaagtttgtctttttctgactgggttacctcactcaggatggtttcttccagttctatccatttgcctgaaaatttcaaaatttcattgctttctttttctgctgagtagtctccattgtgtaaatgtaccacattttctctatccattcttcagttgaagggtatctaggttgcttccatccatacagaaagtactggaaggaaaactccaacccaacataagcaatagataatcctactttaccaaacgccaagagaaaaaagagggggaaattcacacataataccaccaacaacaacaaatccaaacaaacaagaaccaaaaatcagtggtcattaatatccctcaatgtcaatggccttaccttgcctataaaaagatgaatccatccttctgctgcatacaaaaaaaaacatatttctatgtcaaagacaaacattacctcagagtaaagggttgggaaaaaatttccaatcaaatggacccaggaaacaagctggtgtagcaatcctaatatctaacaaattagacttcaaactaaaatcagtcaaaagagatgaagaagggcatttcatactcatcacaggaaaagtccatctagatgaagtctcaatcctgaacatctatgccctaaatacaaaggcatccacattcataaaagaaacattactaaagctcaaatcacacagaaaaccttacacacttatagtaggagacttcagcaccccactctcaccactagacaggaccaccagacagaaacttaacaaagaaacaaaggaactaacagaagttatgacccaattgggattaacagacatctatagaacattccatccaaacacaaaagaatatacattctttacagcgccacatggaaccttctctaaaattgaccacatactctgcaacatagcaaacctccacagatacaaaaaaaaaaaaaaaaaaaaaaaacggaataatctcctgtatcttatcagaccaccatgctttaaagttagaattcaacaacaacacaaattgcagaaagcccacaaacacatggaaattgaataatgcccaattgcaccattcctgggtcaaggaagaaataaaaaaggaaattaaagacttcctagaacttaatgagaatgaagacactacatacccaaacttgtgggacactttgaaagcagtgctaagaggaaagttcatagcactaagtgcccacatgaagaaactggagaatagtcacactagagaattgacagcacaactgaaagttccagaaaaaaagaagagtagacgccaggaaataatcaaactgagggctgaaatcaataaagtagaaactaggtaaacattacaaagaattaatgaaacaaagagttgatttttgagaaaatcaacaagatagacaaacctttatccaaactaaccaaaaggcagagaatgattaattgttttatgattacttttaatctaaggaattagaaacctattgccttttctactagttgttgtccaggttaaactacaactaaagattctccttttttaagttcccttctgggattacaggtgagtactaccattactggcatataaacctaccaatatatgactattagacaaaacacaatggcaagttaatattgccaatatttccttctttctattattattattattgtatccccaaagaaacgtttttctctaatgaggagtcttggtagcttgttgtccaagctctgaatgagcttgtgatttctgagtttctcgcctctaaagagccttgtagacttgagccaccatacctagtatggcctcctgttgtaatactgggctgtattaaaagttctttgtaaattttattaactataaagcacatttgtatgtagggcaaatgcaaatctgtgtaatcatttttcaaattatatggaatcaccatatactttgaagaaatatccttgagtgtccaattagcattttgttaatgacttttattgctatcattggatagtgtatcaagtatatcaggctagtgtctccttttccccctttgtttcttctttcctttccctatttttcttttaagaggtaactcaaatctattcaattgaagcaataccctaaccttgatatggcttagcaggagccgctaaataccttgctactgtgcacactgtagaccgtgccagtctgctattgagtatcttactactgcgcactgaatggtgtgttgtctcaggttttctcagcatgtatcattgctgtgcacaattctggtattctgtggaaggccgctttcatagacacaatgaaaacaaataaggaaccagggaagacatttagtaatagacaagatacatatgttagcaccttgtttcccccttagttattaaaaacagaatgaatagtcattagcagcattttctctcttgcattcttcagttcccctggtggagatacagcatcttacagtatagaaagaggtttgccctggtctcaagacccccagttccttcacaatgacagagaacaggtgtgcatgaccttgcccagctgcagtctcttgatacatgattatacttaaataattgattccatgtaataactaatcttcttttatcttgaagaatacaatattaaacagagtacaaaagtaatcaaaacaggattttgaataatgaaatacaatgtaacataaagttattttaaggaagtgattatttgctcttgaattctcttgttcctgtgtctcacacctctttacttcctatctcaacaattctctctgctgtttatactgttgttgacattttccatctcccctttcctagtgtgatcatatccttcttttttatgaaaaatttcactggattgggtgaaggacagtaccactttaaagacctgaggtcttggttgagccactaattagctgccatgcccttgagaaaggcacttaacctcattgcaacagcttcctcaaatataatacatttacagcttctattatgacctgtgatcttgccttctaaagtttgtggttcatttattttgaggtttttgtacctattagtgtaaacctcatcgtccttaggctcctttctcctttgtaaactgtttaatcatgtaaatgaaggggaaatagaattaagtttatgagggaagaaacctaaatgagaaatattgcaagaacaggagtaatattgacccctttgctcatattattcctcctccttctctatgactggaatccagtgcttagctgaggatccctgcatctgcttccatcagttactggatgaaggttctatggtgacaaataaggtagtcattaatctgattacaggggaagggcagttaaggtaccttctctactattgcttagattcttagctgaggtcactcatgtggattcctaggaacttgcccagaatggctccctctatcaaggtatttctttccttgttctccctctctgtccttcccacaacttgaccctcctgatctctcatgttctcctctcccttccctctactctcccaatttactcaggagatcgtacctattccctcttcctgggagatccatttatgtatctcttagggtcctccttgtttcctggattctctgtggttattgtctataggctggttattctttgctttatatctaatatccacttatgagttagtacatactgtgtctgtctttcttggtctgggttacctcactcaggatgttggtttttttttttctagttccatatattagcctgcaaatttcaaaataccatggatttttacctctgagtagtactccattatgtacatgtaccatgttttctttatccattctttggttgaggggcatctaggttgtttccaggatctggctattacaaataatgtaagtgtccttttggtattagtgtgaatcctttgggtgtatgcccaagaatggtattgctaggtctcgaagtagattgattgccaattttctgagaaaccgccatactcatttccaaagtagctgtacaagtttgcactcccaccagcaatggaggagtgttccccttactccacatcctttccagcataagcattcattagtattttttatcttagccattctgacaggtgtaaaatgggatctcagagttgtttgcatttgatttgcatttgcctgatggctaaggatgttgagcaattctttaagaggaaggagtggaaatatgagcaaaggggtcaagaccatgatgggaaatccacagaaatagctgggcagaactagtgggaactcactggctccagactggcagctgggaaacctgtataagactgaactagaccctctgaatgtgggttacagttgggtggcttgagcagtttgtgtcaccactatcagttgaaccagtatttatcccttgtgcatgaactggctttttagaacccatcctctaaggagaaatgccttgcccaacctagatatgggggtgtgtgtgaccctgcctcaagtaacagatgtagtagattccccatagaaagtctcactctctctgaggagtggatggggggctgttgggagaaggtggggggagagagaggacaggagggagagggaactgggattggtatgtaaaataagattgttttaaaataataaataataaatatataaaatatcatcttgacatgccaaaaaaagatgtattgaagttatgccccaacttgtatgtacttttcttgcctcacctagtagtaatgcatctcacgtatgtttagccacctgacaaacattactgagcatccttcaaggatgagatgctggcagactttcaggatctagatatgagcctgttgcagagccaagaatattggtctgagggaaacaaaccaggaagctgacatttcctctaattgaacaaggcacagacttggaaacacatatgagacatgggaaagccagaatatcaggagactaaagatactatcccccagacttctttggtctatgtctttaatttctcagcctgtccatatctcctgattatatcctgaagttcccaggagtagtctatgtagctgaaccccttgaaatggagcagcccctctgtatagtgcttgctgccttgaacaactatgttgtcagctttcttcttcaaaatacggataatgatgcctgtgcttagatcataaaaaatgaaggctaaatgaagacatatatcatgtttggtgatttcgcatgtacatcaaatgcttgattcattattcatataattgcctctattttatcttttattactctaatgttttaagaaaatattggcttaatctgtaataattgagatgttcttttcatctttactcttcacaaaacatgtggcatcataaattctatgctgtcaataaatgtgcgtgtgtgcatgcaagtgtgcatgtttgtgtgttaattatgtctccagataatagtacatttctgccacaaacaaatataagaagaaaggaggaattactatgcagtatcagaaacaacaatgatcctattacccatgtgccagcaagcagaaatttcttaaatatatcataataagatattaataaaaacatactctcttaagtatatcttggtataggatccatccattctttcagtgcccaccttatccctgcctccccaaaagattcagaagttgtagagaatttaggtagcattcaacaaactgatcttatgtattgaagaacatccttaggagtgcattctggtcttttctgatgccttgtcaatcagagccatacagtagtaggagtcagggaattttcatacatgacttatttactgtttctttccatattattcagccagtgttatggttctggagaaatgtaaccatcacaggttctgattcactcacacctcctttaaagttatcgttttaaggcccaacaaactgtcttttcctcattatttaaagaagaattcctgcaagcaatttctctaggaagttttgcttatttcccacctccaatgaaatgtttcactcctgcgtgttcgctctagcaatctgtctgtgtaatgtggaatttgactctcacaacctggcagtgctgctaatgggcaaatggaggttagcagttatctttcagcaatgacttagcatggtccactaaaaattgctcctggttccacccagatcaaggctcctgaaataattagcatgttcagaatgagctttgggagatagatagacatcttttaccagcaaccaaaacccgcatccatttatagtctcctattttagtagcatgagtgccatcagatactgttctaccaccatctggcacttttatcatttcttctcctactggacattcccccccagagtgttatctgagtgtaagtgtgaagatttaaacattttctgctatgagacattaatgttctctgagggtgagtgtggcttttggtagaaatgtttcccactctcattatatccgcaagacaaaaatcgtgtgattctggacaaaagttaagcatagtgtgaaatgaagagaatgtgtgggaaactcagtccttggcacactaggaaccatggtgcaaatgttagcacagagaagcacatgtggaaggacagtcttcattacttggtcatctaaaatggggacagcaaacttttccttccaagacctgagaacaaacatctgagcttggtaggtcatacagtctgttatcattacccagcgttgtcattgtagttccaggtcagctatagataagacataaatgaatgactatggttgtgccacaataatatacgcaatatattttctgggaatacaggagtggttcaaatgataagtttgtcgtaatcaaataagctaagtagatctcatcccagtattacatcatactttcagcattgtgtttccttccaaaatcaacatgcctgttgtatatttaacccaggatagacccccccaccgtgtgtgtgtctccatacactcacacaaggaggaagcaaatgagaaacttttaaaaacctagaaaatccaaggcctttctgattcccacatttactattggttggaaattatccatatgatttccaatctgatgtaaccccagaactcaggatgttgatcctggcgaatcatgagttcaaggccaccctggtctatgcagtgagaccctgtctcaaaaaaaaaataacaaataagtgacaaagaaaaaggttcaaagacagcaaagaaggaagaaagaagtgtgtgctgattgcttgtgtctgcttcccattgtccagtaaggacttgcagccactgtccttattcatgtggttttatgagtcaaccccagagcactcacagagaaatagcagtaatgagtctccagaaagaagccaatcctctgatcctggtgcggaagccaatctctcgctcctggagacaaccagccctcactcttctgcttaatccctcttagttctatttaataaccgaaatgtcacacatctccataaacatcaagctggaaaatgtgatgtctccgtgttggacacgtctttcagctctattgtgagtagcaagtaggagccagtagttaattttagaatggcatctgtccctggcaaaacgtgatatgattagtttgtgttcattaagcattagtgaatagatctggaacttcgtatgtatgtcaaacagcctcaagtaaaattctctgtaaagcatttccctgccatcagagaggcacccaggtctcagttttagaattgattgtatggtgcttagttctggctagatagatcagctggtgataatgagcctgtgtgtgtcttgccagatcgtaagtatgcttttgtcactcctgctaatgatttatcttattctgtgaaaaatgtgcgtgatgttggtcagaaagatgactagaaaagcaggagggtgattcaacgaagtttctcctccagacagcacaaatagttttccctctggtcctgtctggagcctctaggccatgattatttccttcattctgatgctggcatcatccttttcaaatgtcctttactttttctgaaatcacatctgtgaaaagaggtaaaattggctccttacttgaccttctatgttagatcttcactcctgccccctcctgtaggtttctacattgctcccatttctactaatcacaatctccctctcctccccattttgtaaaattattgtaaaacacttcccttgtttacagatagtttatcacacaccctttaaagtttttcacacacacaccttatggtatgtaatgttgcataaagctccatttccatgctttcccccacagaaatgagctttctcgttcatttccctaccctttaaaaagcagtgttgaccaccaaaagaacatcttgttgtaacatgtagacgtgtaattagtaatagtagtgtgactatcaattaactctaagaggagatactataggcaatttgcttagaagctttgcatagcaaaagtattttattctcagcagatactatatgggagacagttagactcagtgtatcatgtgtatagcatggagtcatcactcgtgtctaccctcattacacaataaactgggagacagcaaaaattatattccctaagatcacactaaggtttaaagatatgaatgagatgcgattcttttccataaggctcttactgagtggtagagcagtggaagcagccatgtttaaaattcaaaacctatctgaacccagttatgattgagccgtgatttaagaaggaagagcggcacaggtaaaccttgaactgaactgaaatccagatgcagagaaggaggaatgatgagcaaaggggtccagaccaggctggataaacccacagaaacagctgacctgaacaagggagagctcttggtccccagactgatagctgggaaaccagcatgggactgatccagaccccctgaatgtgggtgtcagtgaggagaccttggaaatctatggggccccttgtagtggatcagtacttatcactaccataggaatggactttaggagtccatctaacatggagggatactccctgagcctagacacaagggggttggcctaggccctgtcccaaagaatatgacagactttgaagaccccctatgaaaggcctcaccctccctggggagcagaaagtgtatgggataggtagggcattagttggggggagggggcaggggacctgcgactaacatgtaaaataatttttctttctaataaaaacaaaaagagaagacaagtggggatttcttgggaattcaccaagagtcgctggtggggagtcaagtgaatcttcaaggaaaatgctgttttcactggatagcagacttctgctaaaactcctttgttggcatcatggtacagtcctaaagacagaccaaaaaagaggtagaggcagggacttacacttggaaaaagggaagagtttgatgtctttggagcataaagcatgctggaggatggagaacggtgatatgggatgactttctgtgtgctacgaatatgtgttgcttttattggttgataaataaagccgatttggccaatggccaagcagaacaaagccaggtgggaaatccaaacaaagatatgacaagaaagaaggtggagtcagggagaggacatgtagttgctgtggaagatgccagaacattactggtaagccatggtcacatggtgatacacagattaataaaaatgggttaatttatatgtagagctagtcagtaatatgcccaagccactgaccaaacaataataattaatgttaagccttagagtggctgtttgggaactgacaggcaggaggagaaacctccaactactgtggggaatatgactttgggctccaaatcaaagggaaaaatgcaaaaagtaaaagtatatttgtgatggggaagccacagtagagtttaagggaagaggggaccagtgaacctgtagattcctggtccttctctagaaacagtgggaaatgcactgtgttcctaaatctgctcttgctatcactttgtccttcttttctttgccattctctgtgagtattcatgtagaaaactcagaagtagtgttttacttgccttggtggcagtagggagatagaaccaggagtaaacaaaaattgggataatcaggtagggtacactgtgtggtcaaaaagagattcttccagggtgtatctaagtcattaatttagaaatctggcagagcaatgggaaaatgtggttctggttattggagaagcaactggttatagaaaaggtgatgttgcttaagttctgtagagagggaaaattacagttattcaacaaatatatgttaatcttttaatttttacctacctggcccctgagaatgggacaacaaagtgagaaagcccctgcttttatgctgcatccattctgatgggggtggtgagggagaatatgaaggagagctgttacatcagtgctagagagttagaaaaaaagtcaaagtgctaaatagcaatgtaacacaaacctagcaagtctggggaaacacagaaccaagggatgaagagaaggaaagagatgaggatggcagtaatggtggccagtccttcatgtcaggtgatatatgagtacagattaaagttcatttctaagagtagctaggtggaaaattggagggatgagggccgaggggacatttctgtccaactgaagcatgaacatcctaaggaataggatgcttggttttccgaggaactgataaagtttacttcgattggagaagagagtggagggtcaaacggtgtgtgagggagatgcagaaggaatcccggtgagcactctgctcctcatcctcagcagcctgggggaagataatggaaagatttgatcagggacatacttcctggttgtattttgaaggtggttaggagagttgctaaggaaacacaggaaagcatggaatgaatagcagtggaagaagtcttggtggtaactggaccaagtacattatacgacgtgagtggattagagccagattttaaaagttgtacagtcaggtcttttgctaacaggatgccttgcatatgaggaggtgacattgtgttctccaagtgaacacttggtgcccacttggtagtgtgttcatttgggggcaatgttggaaactttggaaagttgggtctatctggaagaagtaaatggctaggggaagaccttgagggtcatagtctagccttaattcctgttacttctcggcttcctggtccatgacactgtgggaatttggccttatgttccacagctattgcttctctaccatgacggactatagtgcagagcagaagccaaaatgaatactttctcctttgtcaggtatttgtccactgtagcatgaattaaaaaacaactcaggagactggtattggggttcaagcttcaagctgaatattagaaaagcaaagcagctggccactagattctcacatctaaatcaggctgtgtgggctgatcctgtctccaagagctctcaccaagcctcagactgtaacttttcctcagtgtggctggagaatgaatgcctcaactgagaccttgctccagtcttctttacccctctaatgctgggattaaaggtgtgagagttatagttctcttttagactgattcaatcttgtgtagatctggatggccttgaactcacagaaattcagctacctcttaatcctgagtcctaggattaaaggtgtgtaccacctcctcctagcttctggctgatgggtttacaggtgttatcaccaccgcctgatctctatagcttgatactgactttgctttgctgaatacacagtcaggctttaataaatcataaataacttatcactacagtccacatcaatagaaaaatcacaagtaactaactggtgtcatagacatatatccttattaatgattttatacttagcattgtcaaaaaaaaaaaagatgcattagcagggttaaccaggcaacaaggacattttcaacaatgttccaaaagggtggaaagaaaagtcaaatccattaggataaaagttggttgtgttttggatcatgcagcaaattaataatgaaaaaaagcactgaataactgtgagatggcatttggtgaactagtttaggccctcaatggttgctatttagcactaaggaaatttaggatcctggcttatagagatttggagatggacagattctctcccttaatgactttttgttggtgtgtgtgtggggggggggtccacagtccttgggaattgttcctgagttctaacatgggccagaggagaaaagggagagtagaggtcatattaagggggaaatgtctacaatataggcaacctgagaggaatgtgagggtcatgttttttagcacagctcatactctgtatatataacttgtgtaagtaagataataccagaccccacaaaaaacatttgatttgggtgaaataataagatttctaccttccctaacaacagtgtgatttaccaaaatgggtttatcttcccatgtttgctcaatgtaggttcttgtgacttcttgcttatgactgacacttttggatctgggaaattaagtcaagtcacttgaggtcaagtggtagttctgctgcatagacctgtcacttgcatttcagggattctggagttcagagtttccacaaaggcaaaagtggagatgagatgtaaaccagaattgttttatagttttaatttaatatgctgtatttgccagctgaaatatattatagtatatccagttttatccatgtgttgtttgatctttgtttcaatatccaagttatttgtggttttaccttatgcaaatcagcataataataaaatatgcccttcaaaggtattgtaaggttaaatgagaccacatgtataaaagtgacactgcttagcttatggtaaaatctctaaaagtattttctattattatttactggcatttcttatatgtctccactgaattcaatctttcttcggaacaagaactgagtctcttcagcagtgattcccatgtgctcagtatcacacatcagaaatagattttgactgactaacaaacatgaccaatgctgtacacctcagatcatgccttataaggaggttgtttatcaggatcatttatcaggcagattgatagctggctagactctgggtgtgcaaagaggaagcaagtacttcagtgttagtgaagcaggggtttcagactgggaggcacatgatctcagccgtggcaattgtaaggtggtcttgtgtggtatgttattacagactctattctctggctgacggagctactgatgatttaaagcaaagtccaatgtcatacgtggttaactggtttagtgaaagacaaggagtagctctttggaagattgttttgactgagtagaatactgtctaaatcactgaaaagaacaagaaagaagatagaatgccatgccgatatgaaatgatgctcaagaatattttaaagtgaaccaaagcattggtaactaataggttgtgcacattgcatatgcgaaagctctataagtatgcatgtgtgcagctgcagagacatgtgaggatatttataagattacctgaaataattcaaaagaagttctttcccgtggtcttagaggtggagccccagggctttgtgaatgtttggtgggtatcctattcctgaactatcttcagatctttactattttaatttttattttttgttcatatatgcacttttatttgtgatatatgtgtatttgtgtgtatgcgtacatataggtgtgtgtgtgtgtgtgtgtgtgtgtgtgtgtgtgtgtgtgtgtgtgtgtgttttggagatcagaagttaccatcagggattttcctcagtgcttctacacttttttttgagacagactttctcacagaaacctagaacttactgacttggctaaactggctggccagcaggatctagatatccacatttttctgtgcactagggttacagataggcactgctgctatgcctgctttctacatgggactagatgtacaagttgggtgctgatatgtgggtagcaagccctttggccactgaactatgtctctaaaccctgttgttacttttgaggaaggtgctcactaagttcataaggctggcatcaagctcactatgtagcacatgctaaccatgagctcataatccttctgcataaacctgtttcactggaattacaggtgtacaccaccacaactggttaccacaatctccaaaaggggaatcggtaatttggagcacaacacatgctgtatcatataatctgcattttaattacttaccaaattatgctatttaccttttgaggaatatgatagcagaattacacatctatgtaattcagatgtgaagccacatttcagacaccctaaaatgtaggctgctaaactatggtttagcttttcattctgattatgtaataacaatattgttattaattttctgaaattttcatataatgtattttgatcatataatcttcctccacctcctcccgattctacccaccccattccccacccacttaaatttgtattcccacctctccttttgactatgacaggaaaagagctaagtgaaaaattagtattacatttctttttctagcttcagagttcatgtcctttttgctttgtttgacttttcagtgtaaaaaggtttaatcctggcatttttgcacatactttcattgtcctttattcatatctgctcccctgttaccagcatttgtccctgccccccattctccttcctctctgcaaacagtccttcggagctcatgtatgtacctgttcttattgttgatattcatgtcatttcttataaactttgctttatttatagttgacacttgactacctacagcatcttatcgcttgctagattccagtatgaatttgagtcactataattccattatagattggtaaaaatatttcaaatatgcatgctaatatcgttgcatctttggtgcaaaccctcacttgtgaggaaaatttatttgaaatttaagtgtgctattaggcaagtattagtctctgcaccatggtattctacagttaaataaacactgggcattgctcttttaatatcctgagttctcaagttgtggttccttttacagaggagaaaagttggattaagatcaacaactatctaaagaaacagcaggaaagcccaagagtctaagaatcattcatgctacagatatactgctattgtctgatactctctttgctaaggcacaataagacaaaggcatggttttcctataaggaacttaaaatctagagaggaaaacccattaaaccagactaaagacaaaagaggaccaattaggaagaaagtgcagatcaagaggtatttaacagaaatatcacaaaacagggctttataaacaagcacagctgaggaatagccctgaaacaaaacagtatatataaactcagaggtacaaaagcccaatcccaacatgatggcaatccacaaaagtttgaaattgctgacttacagcatatggttgggaaaggacacaaaatttgataaacccatgtcaggaattatcttttccttgtacacaatggaaagccattggagaatgtttcttcactctttacatatggtatggctagattttctccagcattgtgagacagagtaaagtggggaaggctggaaggccaaaggggcagaaatggatgtcctgtgttaaggatactgaagcaaaacaataggcaaatcaagtaggtattcaagaatttaaattgtcgccatctggtacctggttaaaggtgagtcaaggaagcagccattgttgactcagctatatgattcaaggactggaagaacttagattgtcatgtcatggcattgcataagagctgaaaatattggctaggttccagtactgggtgtggaagacagaagagatgggcagagttaatacacacgagtcatgaatgggagaagagtcattaaatcaattttaataatccaaggaaagcagagatctgggctgtaagagtttatagctgttctcccttaggatgctcccatttagttttgtttataaaatgttttccttatttttatacataactcagatgctcttagagtctagcttgaataacacaggatggagttagtaattgagaatggtcaggggtgggggtgagtgttcagaacctttattcacaaatgtactgagtgacagaaagtgccctccttcaatatgatggacagaaccaggatgcttctgcttccatactcttgtaaccctataaacacaaagaaatgttgtacttagtggaatgaagaaggaaagaatatagaaaccacgggcagcaacaatagctcacatgttgagatagagttttgacttggtggtatatcattggcttccctgggtgtaatcatatatgaggtttccagtctcacagaaaacaaattagaggttagtaatggcactttgtgataggaacacccaagctaagcagactacacttaaacttcctcactctctatcaattttcctcttttactctccatgtgcagttgtagtctgtatattctattaattcaccacttatattttgagaacagagccctctaagcttgcatgcctttaccctacaggcttgtgtgcatgtctttgtgtactatatgagacattaagtgcaaagttacccttctgcttatccttctccttggtctttctcctctggaattacaacatctctagaaaatatgattttattgccagccctcttcagtgtgctccatccccttaggcataactctgggagggaaggaaaacttttatttcattgtgctgtgtgatttgtacctgaagtttactttgggctatttgtaaatgtgtgcctgtgttaaatagatcccagttgtagtgctctgaagcatttagtttatttttgccctaagatgtgtttgcctcagcaaattgtaagtgtctgcctagaatttcttttgatatattaaactctacagactgctatcttcaactatatctgacacagcatccatggttctggaatattggtgcaatacagctgctcagtgcttggtaaggtattgttggaagttagcaacagggttaaaatattgctaaagcagtgaaaaaatccagacttattgttgcagctctctgggacctctgcagtgaaattttaggcttaaatagtagtaatactactactacaaacaagtattgtacaacagattctgttattcacaagggcagcgatatgaaaccaagaatcatctgaattttaaattctgttaagagcagatcactttgggaactgtcaaaaaagtgttctgtgccacaggtgctgtttctggtttgcttctaggatgctgatgttcaggtaggaggtatatatccttcaattgtgccctccctgtccagtggaagcagaaaaccattaccacattgttcccagatagaaagaatcattccatttctctgccatccagactgtctcttctttatccagcatttaagtatctgctaatgaatctcacacagactgatttactctctttggcttcagaaatcttttgtatagcaaacttgagtaacagagggacccttctgtgtaaagcacaggggtcttgtcagagaatacgacagaagagctgcacctataaaatgtgctggtgccgagtcaatagaaaagagtgaagcactagcatctcactgttcctgttctgttcaggaaatagctatttgtgagcccttccctctcctgctcatgggctttgaccttgaggttcttagatggagtgatgattaaaattgcttggggaaacctcagtacacttgaagaccagatttacatatctaatttaatacactgagactcttaaaccctccctagtgacactaatggactgcaaaagatggaaactattgcttttcttgtggttttccattccatcaatgattagaagcaggcatgcaactaactggggaatacatagacccgtaggttttgtgtatatgttggggtttgaatgataatggttccagaggctctcattatcatttgaatgcttagtcaccagggagtggcactatttcagaaggattgggaggtgtgaccttgttggaggaagtgtgtcactgggagaccaccttgaggtttcaaaagcccatgccatctctctctctctctctctctctctctctctgtctctctctctctgtctctgtctctctgtctctctctctctctctctctctctctctctctctctctctctctctctctctctacacacacacacacacacacacacacacacacacacacacacacacacacacacacctctgcttgcagatcatgatacagtgctcagctttgtctctggcagcatgcctgcttgccatctttctttctaccatgatggcaatgacctaagcctctaaacctatatgaaagtcccagttaaattctttttcttgtaagaattgccttggtcttcacagcaatggaaaagtgactaagacagtgtctgtcctgtgaaatacgattcaggatgaagcttgctctctgaactacattttctcactgtctactgagccttctttgtgtggagtgtgagcattatttcaacaaatatttgagaagttgccatacctattgccacataagcatgaactgttcccttttcaagttgctcccatttccagtcccatcagcagctcattttgctcatggacacagcatctaaggcaaccttaatgattccagatgtgggtcctgtcacttgtttcctaacttaggacctagtaatcctgattatttcaactttctttatggtcactgtgctagtttatgctcccaaacatctgttcttcccctcttctttccctacagctacctttttatctggctagctcttattcatactagaggattcatatgaatcattcaatttttcctgagcatcattctttgaaccctcctgccactgaggttttatgctgtctaatccatctaggcaaaacactttatggtattttttaagttgactgatttcactaatgcacctcactgtgctataactcataaaagcatgcctttatatgtgtgcctgttcacttgattgcttattgagatgaactgattcaggataatggcatactgggatacttctagtaaagtaatattgaaggtcagagcaggacagagctaatagtttggcagcaaagaaagaaacaaaggaactaaagaagggtcagtgatgggaaagggccagataaggctgtctggtttgggtgcctcagtccttctacagggcatgaccacactatggctcagaataaaaaaaatgaaagtgaataataatgaatcctagtttattaaaaaagtattaaatatagatgttgcttaaaaataaaatgagcacaacactatcaattttaatgaaatttgataagatgttgcaaggagctaactacttttagttctaattcctcatctgaaaaataaagacaatacatttattactaattatcccacttgaaataatgagataaatttatgtgtgttgtactatatgtaatatttttaaatgttcttcatacattataacatttgtttacaatgctaacttgttaatgacttggctgattacagagtacatgatcttgtcaagaatatatgtgatttaccatccagccatggcagcttatataatcccagccttttggaagcagaagtaggagaatatccaagagctgagatcagtctagtttacaccacaggttccaggccagcatggattaccatctgaaatccagtctttgggctttgaaaagtattgtaaacaaataccttaatggaaatttatgttaattctgtttaacaaatatcattgaatcctttcatacaaaagacatcatgactactgttgctagagtaggaacataaaaccatgtggactttaatctcatgtgggttcaaagcaaatatacaaatgaaaaccaataatgaaagacagaatgataaaagctgccatcatgatacaaaagtgtactgtgctaactgtgattcggaggatcaagggaagtcttaggaaagaagcaggtgttgtaagtacaaacatcattaaaaacatcttagggtggggatagcacatcatgaaacacacatccgccctggaatgtcaagtacagagggggatattcaaaccagtgcctgatcccagaggatctaaaatttcccaacaatgatttgaatgtgttgttctcagcgttgagccatcaagggttttgagaagggtacaagggccttagagccctgtttacaatgggctccttgggataaagtaaatatcaatatagctttcctgtgtttctgttagcatattcccagtgtgcatgtggggggggggcagggagtagaggggattacctttagactaaggaagttggtttcctgtgagatcagtgagaagcaaagtatggacatcaatttctaaagcaagcatgaattatcactctgtctcttacgtatacttgatccacaatcttaggaatttattggatctattcaagcttctcttttgttctacaagaaatatgtttaaactctgagagccatttttctgatggagctatccttaacatattgtctagcacatggtaaccattccatcaataagagccactgtctttcatgatgtgagttgtcattggagtgtgaagtggaatttttattgacattgtatttccttctatttcatttatgagaattagggacatttcagctgatcacttcttaaaaataaatcaatttttttctctttttgctagaaataggactataaacccacaggaatgcaattaccacttaaatgcacataagttagccaccagggattcgataataaccatgttagaaaaatccgtgcttgcagaactagatggatagtgaagacaatgacaaagatcctggcttttctttgtagcagtggatatatccagggacaccatggcatagcctaggggggcaggaggctgaaagaggcagtatggaaggcaggtccccatcaggaaagatggttgccaaggtagcacggtcctgttggattttaacacacttaggacctgggcttcatcttagcaggagaggcaaaagtcttatgcatatgcccagcatatgttcagttgctcagcttttagtggaaagtacttgttcccttgagactaatttgtgaactgaaatgttagcctattgtctgtgtctgtgtctatcatcaggatgggttactattgtaagcacataaaaggctcatctgagagcagtgctccttttaggaggatgagtatactggtggtctctggtctccaaaaagcctgtaacctctcagtctgaacccctccatgcacacactgttgatgtgtgtttcctcagtcactttttctctgtgtgctttgctgacagaaacgccacttgtgatgttgctttttccctttattccctttatttcttcttcttcctcttcttcctcctcctgctgcttctgattttgctttttctgattcttcttcttcttcttcttcttcttcttcttcttcttcttcttcttcttcttcttcttcttcttcttttttctagtcaggacctctggtgtttaatgtagtgtttccctcaattctgttcagatttagttactttgggtatctttaattctattggtttaactgctgttactatgacagtcttcatgaattcagaaacttagtgtatatgtttggccatccctgttttgggggctggtggtatgagggtagaaatgggtggcacaagggcatctcttcaatagggtacatatttgttaacatgatggaatagctttattctcaccagtgaataatctgctcagagacccaactactacccaagctcatccttaaagtagtaaacctcccccaggagatcagatagtgttctccagaattgtgtcagcctgtgcccttcttgattagttagtgccctaaaagtgaaagaatctcaatattatatattggcactggttcccctaattacagtaatgtcatatcttacaggaagcctttgtgtcttttttttccttttttgttttgttttaggctagaccttgctgtgtagcatgggttgccctggaactccctatagagcccagagtagtctcacatgtgtcacccttatacatcagtctccagagtgctgggattaaaggtacttcacccagcttaaattttatattttcatttctttagataaagtatcagtatgtaggaactatgaggcttgccccaggccccagacccaccatgtagttgaggctagcctagagctggtatcagacctgcctcaacctcctgactcaagacttctaatgcttgagaagaatctcatccagtgtcgtgtcgtggttctgcatcatattgtagatccaaacaggaagaagggtcacactgggctctgtaacctcaactccaaaaagtctgttctagaaataaagccacctgcacacacaaccatttcctctagtgcataaaaggctcactcacaacctctggattctaagttctctctactctccttctttattgacctcagtgactcacaatacccttcaaactaaatggtgctttgtaaacgagaaatctgaagtgtttatttttaaaataaataaaatattgaatgaattatacctatttgtaactgtataaagtcttttcttcctcttttcatttactttgggagaaacttcaaacagtatttattcttcaaatggtgactctcagatacgacattgtttgcttccccacaacacatttcatatgctgtcaagacaaactatttccaagttctgccaacgctaattgcctttatagatcaagttgttaaacttgagttatagtttaattatgcagaaggaaaatgcatgcttgtctgtactacaaatgatttcattctgctttgaaatgaatggggctgagaggacctgttcttcttagagattttcagaattttgtgggcttgccttgatgtctctctgaatcattatgttacatgaaaatgttcacatcaaaagtttttgcaatgaaaaacaagagatcgaaaatccatttagaggatgaagtaaccaaagaagagctcaattaaaacatcaaagaaaatacaagcacttgtggaattttagctcagactttctccccctctggtattttgggtaaggattcagtcagtccaggagactactactgggcaactgttgtgtttgaatcataaattctgactgtgtctaaaggacctagtgaaaaatgatgtgacctcacctctggagaactcagaaacttttgacattgggaaacagacaagcttgtagagtttttctttctgtgtgagaagtaccaagtatcagtatgaacatcctatatacaaaaagttagtatatatatgtatgtatgtatgtatgtatgtatgtatgtatgtattacatcagaactcagaaaagatgtggtaggggctagaagaaattaaagaagagagtccaggaggttggggaggggagcatagaaatggctctagcttttaaatgtttacttaaatgttgattatatatcctgtcaaagaagggctggtccttcaacctctcaaaggcacctttcaaagtaaaataattaaagacaaaggaggaaaatcaagtgtaatcattttgtactgccagtaagattttcttgagatgatatgatatagacgtcaaactaccccactttcctgtttctcttgtaaagaaagaaaaacataccttgaaaatcaaatagtgcttactgtttatgccagggtttagcatctatgtaaatattcacacacacacacacacacacacacacacacacacacacacacacacacacacacacaaacttctataggtttttatcatcttactatctgtgatttactcaatgttttatattccattaataaaagatgctttttgcagccccctgaacagattttacaatcactttagaaagccgaattgagaagagaaagtacagcttattctcaggtggagttatagattttggggtctattagatgattcaagaaggcttcaaagaatcactgcttgttatggtaacaacatcactaattcctttaataatatacatctgtgcctattatcaagacctccccaccctttgtgtcaacctcaagtgtgagagatatcatctggcagttctgcctctcctccagcccatcagaccagtggtacaggtgctagtcatatgttggttttctaggttaaaattccatggtccctgcacttctgactgtggaaacattcttctttactactgtcaatagcatgggaacttgtcataatcagttccagctgtgtgttgagccaaagttgaactgtttgttgtcaggtcactcagcacatagatggtaaggctgtgatttagacctgcctgatagtctgtcccattaatgtctactgtaggcagcaatcctaggagccctgatggtagaagtggaatttgatgactgagctagtaagcataggaatgtgttaagactccagaggtgggaacaccatgagaacaaagatcttgaggaaggtaattacaaacagaggacctgggctgaccagacaaagtacaataacaaagctactgtatctgaaacagaatggctaatggagacagggtaaagctaggatggatccataggtaggaatcagaacacaatttcacagactacagtaaggtgctgattggggtcattacaacaatgcaccactggtgatttcaattgttttgttaccactttagtggcagggataagaatggatgcaatagcaggctgtgagttggtcagatgagcaatgccaaagatgggcattacggaaatctatagtttgtcctgttaaaactttttaatcctgattttgttcctagaaatgggttaagcatgagaaataaatcaacaaattgaccaaaattagacacaatccttgacttcaaatgaattacaatctggaaagaactgtcatagaagtaaatcactagtataagctcaataagggcaacgaattatgaaggactataaaagcataaacactatatatatatatatatatatatatatatatatatatatatatgacctaatttagctggaccatgtgtgatgatgatgatgatgatgatgatgatgatgatgtgtgtgtgtgtgtgtgtgtgtatgagagagagagagatcacatgggaggtcagggaagaatatcagaatgatcagaatggaggctaactgggatgcagcacttgaaatttatagatctggttgtggagcatttgagaaggcagcatattgagggacaaagtgggaagaggtgacaaggagttggaaacggcagcaatgagaaaaccattgacagtagtacaggtcacaataggaggctgggctttattctattaaatatggaaaggtttttaatggaaactaaatgtttctggcctctcttagttctgtatgtctgagatttaatctgaaatttgccaaagcaagaactacaaaatagtctttgtaaaacacttaattttctggcatttgtttcacataattagagagattttcaaagaatcagcatgcctactcctcctctagtgtaactgaacattttcaggataacattgaccttatagtcctcgtgttctgacactgtagtgttaccttttccaaacctagcatgcctcagtcacctcaggctaattctggacccttatgtcttatgagagtatatgggctggaaacacatgtccagtgtaagtctttacaggtgaaaccaaataatacctatggcaattgtgagtgccatcttaagagaagtccagaacaaacaatactaagatgctcggatggtttacacaacttaacaactgggctgtgtctgggcattcctgacaaactctgaactcaaaggaaaagatttctaatgtaaaagattgataggatctattctcaactgagggcagatgttcctccaacttaacaaagggtgtttctggagattctttgcctgtactcctgggactaaggtgctgctggtgtccagccaatagatggcaaagatgcagtcagatgccccatgtcagttcagagtattcaggacaggacctatggtaaagaatcttctgtctggaaattttagtagtacttcattagtttggtttatcttttgatatgattatgagtaatgtttatttgctgagaggcaacaactgtcctatggatagaaaaatgttttgtttaattgagaagaaaagtaatgtacaaattgccaaattgcttaaatatgaaaagcattcaacccactgtcatgtatgtgtcttaaatggagaagcaagaacagtgtctcaggtaggtgaagaattcttcagagtttgtgcctgttatttgcatttctccccagaatacactctgactagtcttgcctaactgttatgggctgtgagctctcatagtcctgagtggctctatcctgcttaaacatccagagatcttattctgatcctccaatgggagcaaaggccttcttctgagaagaaagatgtttcttcaacacaggtttcatgcaagccttgtacttatgtctgacattaagttatacaaactgtgctactttgtgtgttagaaactaagtgacaaataagatgaagtttgtgataaatggtgataagatgtttttaccattcttgctaatagagtttgggctaggggatatttgttaggtgtgagagatgaacagactttcaaaactgagcaatataatggatcaaagttccctatcatgtcacagaagtacagacaggatcctgcttctcctggatgggagaagagcattgcctggagaagcaacagagaacactaagagatgaaaactaaaccaataatcttattaaatgacgaaaaccagttggtactcattcttgcgcacccccacacacacacaatttgtgtattatgatcccaattttacttagaaaattgggtggatgtccctggagctagttgtagatgtgattgtgagaccccccccatctgggtgctacagatcaaactagattcttctgcaagagtaatatgcacttttaaccattaagccatctcttcaaccccagagtcaattatgtgagtgtctctgtgtgtttgtgtgtgtgtatacttacatgtgtatatttatgtgtgcatgaacataggaaattgtctttaaaggtacacaccagattgtttgtgccatctgtttgttcagattgggaaaaggaataaggaataacttcgttacttagaaaacttgtgactaggaaataaatcatgtctgagtgagaagtagtaattgccagtttaggtgctgtgttgatgttctaggagcttagagagaagaatggtgtctttcaatggcaagtaataatgaaaggcaacttcacgacagaatagaataaccattaagaaaaatagtgctgatgtgtgaggagaaattacagccagcagtgtaatggatattttgtgtatgccatgaagtaatgtgcaaggtaatatcttcctttccaatgactcccttgttaagctgcagaggagcatagggccagatggcatggactcattttgcctcctgaccaagtgatgcattttctcccacctctccttatggaattagttttgttcactgcaggagtaatcttcactctgggaacagacatggtggtatatgctcttcctcaggatgctgacccactgactatgataattctcttccagccttactttcctccccatctggtagtttatgctagaaagatcctggaccagaattcagaccacaaaattaaaacagtctgtttaatgaggccaaatgcaaattgctcaaataaagacattaagggatgaagtggcaccttaaaaagtatttagagacgtctaaccaccactaaaggatgctctggattcaagtgagaatcttaggatgtcatagtaatttctttatttttttaaagattactgttatgaaactactaaaaacaaatgaaaatgacaaaataatgcccacatatgagcttagttagcagtgctgttttacttcatgtttacttgataagacaagttttgtcagacaattaaaataatgaacttaaagatacgaatataatcactgaagaaaatgacagtcaccacaggttcataaatgaatattatagacatgatagttccatttttaaaccatgataccttctaaacatgggtaaaattctgtcagcacgaatgcatccctaggggtctggtgtttgaaagcatgttttgtttggcacataatttctttattgtctgtttaatatcactgttgctatttttcagacccactatgaaaatggagaatatatcatcaggcagggtgcaagaggagacaccttcttcatcatcagcaaaggaaaggtaagtctgagcagcatattgcaagaatgcatgttttgagtcttgtgttgcgtgggttgccccctttttaatctgagagttgagcttccaaaaataggatgtaagaaaagaaggtgggtaactttgtgtatggacattagcagccatgtcactagatgctacctctaagtctacataaacagaaagacatccgtcaacaatgaaatacttaaatctatctggtctttaataacagtgaccttcttataatgaactattaggtgttagaatcagatgaccccaatttgaatcttcagtaaagttaacttattttactgcttttaggccaatgacttaatgttctaatggcaaagctgatataaacatatgtatgctgtattgtagcttcatggagaatgttacttgaatgccaaaagctggtaaaagtagtaatatgtaggaggagggataaaagcaggtgtgaccaatattatgaatgggaaataatactgtcttatgttattttagctttaaatcaatgtgaatctattataatatttatttttggactatgaaattaagtaaacttaaacaaatcttctcacttcctattacccaaatacttgaaattaacatttcattgtagctactcttaaagagatttttttctatgtatcaggttcgttgagagacaggaagggaaaagacttacatgtctgtttcattattataattaatcaacttgttccttaaatattgcacaaaatgactaaatttggtactgtagaatttatatgagaaggcttacagaaatgcagtaaacaggaagtgtagaagacgctaaattatagtgacttaaattttaggtgactcttgtgtactaattttggataaagatgacatatatctcaatgtttacagcaatgacatgctatacacaaatcttatgtgtttctattgtatctactcatttggttgatttctggacatcaaagactggttttgtaaaagacaacataaggagccaatgaaaagggttcaacaggaaaaggtgcttgtaaccaggcctaaagacctgagtttaatacccaggaccacacggtagaaagcaaaaaccaactactgcaaattgtcctctgacctccacttggacactatggcactatgacagatgcgtgtccatctatatgcacacatgcaaacaaaataagtaaataaataaaatgtaatactttaaaagacaggaacaatgaaatgatatgtgcaaacatagttatgtttaaaatcatgttttgtgttttccaaagttagtggttaggaattgctaatatgctgtgatttccataacaaactggcaagctttgtcactcactgtcttctgtgttaactaacactgattaaagaatcagtcaaagaaaatacttctgtttataaaccatttgatgatcacaggaggatggtgtattctggagtccggctttgttatctttccaaattttaaattttggatgccaaggagtagctatgcttaacaattaggaaggacaccctacagtcatttatgactgtcccatttactgcaaattgccagtattgcctgaaggatgaggtttgtaacccattttagctggaaacaggtgtgctagttgtactgttttatgagttctgtaacatgtataaatagaagaacttggagataataccacagaagccaattgtcagtagtttggtacaatgttagaattttgggagagtaatagtcataatatattatgttcctttgacacagtcaagttttttgataaaccaactatagaatttttcttagtttctagggttacacaagttagttgctatttttcacaactctgacaattgttacactaattatattaattttaataataatatattaaaatcagtataagaagcagaaggtatgtatacctgactccccactgcatggaataggaaagaaaatagtggtttcacaataaataagctatgaaattagaattgtaaataaactcactataaaacttatttattgtaggtaaaacattgtgaaaatttccccatgcatttataaaatttataaaaagtaaccctggtaaaggatttttccaaaaaaatattactggatttttatttattttgtgaatgcatgtttgaatgggggtgcacatatcactgtgtgtgtgtgtgtgtgtgtgtgtgtgtgtgtgtgtgtgtgtggtgttggctgtacatcagaggacagtttgtaggggttggttctctccttccatgatgtgggtaccaggtttgaacccatgtcatcaggcttctctactcactgagccctcacacaagccttagtaaagatactttcttttttaacatttgtcttcattacttatctattgctatgatgaaacacaatggtcaatgtaaagaataaaagaaaacatttaatttggggcttatgagttcagagggttagattgcatgatgacagtattgcatgcttggcagtatgaacagatgagtgtttgcaggcacatgggcaagttggaggcagagaaaccaagagacatctgtaattgcctcagttttttgaaacctctaaacctctagacccagtgacacatttcctccaacaatgtcacacctcctaatccttcccaaatagttccaccagttagagatcaagtacccaaacccataagcctataggagacattcatcttcaccactgggctgaacagttttcctttttaaaaatactatgagatgggaggaggtgcacaacagtggctgtggagcaacaaatgtattttcccttgttcagttatgttggcataactgaacatgttttattcttccagcaaatgtatgcacacaaaagagaaacaatataaacttttaaaaacatgttttctcttaatggacatttatagttttttttcctctaaaatcttggggctcaatgctttcagcagcaatgtctaactttgaaagtaaattcaatctctgtttattggtagatagattttttttctgggaacatggcattttcagcagaagaaagaagcatcaaagaattctgcaaatatccccaacagtgttgcatcaataccctgtctctctaaaattgaacaggattattaaatttcaaattaaagccctgaattatggggctggggagacggcacagttgtgaagagagcatactgttgctgcagtggacaactgtttggttccaagtgaccctctgtaatttcctcttgaagggatcctatgcttctgacttctacagtcacctgctgtcatgtacacatacccctcgtccccacatacctatttccctgacacacatcattaaaaacaagtaaaaagtaactattaacaatgaagctggcatgcacctacatgcttaataatggctaaatgggagagaaagttgactataccaaattctagtgaaaagtgtaccaagtagaattctaagacattattggctaagattgcaaaattaaaatattctgaaaagcaattgactgcttaaaaagttaataaatgtttacatatgattcagcagcctcatgctttatttatcctagaggattgaaagtgtagttctaacaaaacatgtccatcaatatctatagcaaggcaatacaagagaaaaatggtcaaaaaggataattggatataatcatacaaaccaaatataatttgaaaaaaaaggttccttttctattagcttcaggacaatgctctctaatccccaccttcctagaaaaccagcaactttacaatgataagtgctaattacagaactaaatatatgaacttccattcatggatagtgaaagtagatattagatatttgtactcagagtcaacacctgaaaaactttggtccatacttgttctttatttgtgcgagcattgaccctactgaaacccttatttgttggtgccagaaagcaagtacaggaatatttgtagaaattttgttaataatatcataccaacaatgggtaagaataaaactaggagctatatttgcatctagggaattgctaagctgcatactatttatgtaataggatgcaacacaaatagaggaaatgagtttgagctgcttatattaacatgaatgaatcagaacccctgagagtatggaaccagtcacttctactttaaataagactccccactgcaacttcttcatctataaaagcctcatcaacatgcaaattagtatctctatgatatagcttagcggtaactgacagttaaaactgaattttcacggtttgaaacaccatgtagaggagtaatcaaatggatcagtggagaataataattgaattccctctaccttgcacaaaccttcctaatggtaataaaagttctcctcattgatgtccaatgtctaggttgagaagcctaaagcatgctgtttttaatgtgtttaagtgcttgatgttgtctcaataaattagttttctacttcattgcctttttcaggtagtgaattttaattatttaacctttctggatggtaggcattattattatttttactatacatcaaagaagtgaatgagtgaaaagataccatttagagtaattatattttccccaaacaacaaggaaacagcattgaaaaaaaaaagggaaaaacactgagagggaacatcattaaattcatcaggatggttgcttcactgaaggtaataaaatcaagagtagcagtgaatattaagtgaaattcttatttctcaacaatgcattgttttttaaaaggagatgaaatattcataataaattcctgggaaaacatgggatttgcaagcatgcagctgagttagacattcctctctctttgtaggtgaatgttactcgggaagactcacccagtgaagacccagtctttcttagaactttggggaagggagactggtttggagagaaggccttgcaggggtaagtagatcacatgtgcacagtttttgcttaagtgctatacaatttactgaaaaattgagcttctagtaaaatagacccttcttgtcgggcccacactaagatctttggctgttgcattcaccaagttccagctggatttgtgaactgcttacatcagctgtgggattgagtaagcttctaatatatgtgtgtgatcttaatcagagcatgttttaactttgtgttccttaagtgaagtctctctatataactcaaacaagagggtaagaactcctaaccttaccacggacacttttctttggaatcagaggaaggaggctgactaaggaatttgaaatctttaaacctgtaccaacagtgaatcagcaatgaagtcaaactagaagtacggtcacctctggtgactgttgtcactgctgttactttggtggagatggagacacatacacctgaattcactgtgcgaaaactctgaagactgggttagtggaggtgtactttaagaagagtgcaactttgctttttcaatgcaattcagcttttgggacttggcaagaacttgagatttcttcccgaatcatatggaagggaagccaagttggttatgtgatttgcattttacagaatgtatgacaaatatttggggggctgttatcttccaataagcaacatatttccttaaatcaataaatagagactcctaagtttctagtgcatatgtatctgcagaacttgaagaagagccaactaaattttgttgttgtctttatagcagtgggatagaatttactccgattagaatatcattttcaaattataagcattcatataaaagtgctataaaaatagtgtcacagttggatggcagattttactctgcttcttttcacagctgcagtcatgaaaccagggtatctctatagtcagctaagtcgggctgtaccactggaggaaaattgagaatgaactatactaactctccgtttgtcttttattgggtttgtttgttccttatctggtgaacatgcatcaccattagattttttccaatttcaaaactggcggatggcatgtatagtgggttcccaaaagggtgcaatgagcactatatccctagactgaagcccacaaaactcacggtttcatttgtcttttcttggattatttaatgcatgtagggctctatagaatgttactgggtaatttcagtggtacaaagatcatctgcttccaggaaaaacagtgttatttccacagagaaaaccaaattaggaaagcaaaacaaaaacaaaggaggcaaactagagaacctttctaatcatttgcagctgaaatcaggagtcgaatgttggaaataaattatgactgggaatcacaagatggtcttttgtagtgtattgtcacaaggatcaggtgccaaataaagatgactttcgaagttgaaaataccttcctggaaagtacaatgctatgaaaatttaatcaagttttgctatgatatcaaaatttatgttaatgaactccatgttgcattctttctagcatcttttgaagaaaagttttcattttgacagtttcatgtatattttgtttcattcatatgtatgtaaatatatgatacattgggattatatttatcctcattgtcctcttttatgtaccatctttttcctctgaatcccttcttcctaatttgtctccccagatggatactccattgagtaaaatgatctcccttctgtagcaatagttagcagtcaacagctccttaggaagggtggcgcctcatggagttcccctcttccatgacatttaaggcactgtctcgtgcaggtattccttgctgtctatgtgctcctgattccaattgctgagtagtctctgggttgcagtgattcatgcaacttcttatatgctttccatctcctattctaccatattccctgggccttcgatggggaacaatatagatgccccaatcaggactgagcactcagtggtcatttattcccagcaccttcaccagatatgagtccatacattgtatccctgttcaaaaaggaacttctttgcctcaggctgatagtaacactaatctgtggataaaaatataaaaatttagaagggcatttaacaacatattcatttaaagaaacacagtagtgtttcctttctggggccgtaacctcctcaacccgaggctttgactatgtttacagtaccagatgtgtattattcaaatgtaatgggctccaatacaatcacaaagcagttgggtaccccctatacaactgtgctgctattggaccagtaggaatgtattacctagtagcttgatattgcagccagcatggctatagttgggtgaaactactgacattattttccctattagcatctttttttttccatttttatttgaattagaaaaaagattgttttacatgtcaatccaagttccctttccctcccctcctctactaccactaaaaccctacctatcccataccctttctgctccccagggagggtgaggccttccatagggggtcttcagagtctgtcatatcctttgggatagagcctaggcccacccgccatgtgacttggtgcacagagtatccctctatgtggactgggctcccaaagtccacacctatgctagggataagtactgatctactacagaaggccccatgatttctgaggcctcctcactgacaccgaggttcctagggtctagataagtctcaagctggtatcccagctatcagtctgtggaccaagagctcccccttattcaggtcagctgtttctgtgggtttctccatcctggtctgtacaactattctcatcactcctccttctcagcaactggattccagttcagttcagtgattagctgtgggtgtctgcttctatttctaccagttgctggatgaaggctgtaggatggcatataagtcagtcatcaatctcatactgatttccaaagtggctgtacaagttggcactcgtgtttctctttctccacatcctctccagtataaactgtcattgttggttttgattttagccattctgacaggagtaagatggtatctcatagttgttttgattagtaccctctagtactatggatgctagtcagcagggacagagttttctgttcacttccaagttgttttctctatgttctttaaccagtgtgctgtctttgtccatagatacttaggaaggatggggcctcctaaagtcacctgtatccatatagttctgatgagaaaacaagtggtaattatgtagcaaatattcttttgggggaaccaatttagctaatttctagcatattcttggtaccaataatttatgttctctcttcatctaactctataatgtccctccacctttgtatccatcaattctaagtgccttcttaaatgtcatcaatacttgctacttcataaaatgatcttttatcttcatttaacttcatttctcagccataaattttatatagttgcattgatgacctatcctgtttaaatcacacaccttttgagatcctttatgtaattaatattctttagaattcatttatctaaaatttatcagtattttgtcaactctttctgttatcctggtaattcctcaagctctatatctgaatatgacttcaatgaaagaagtcctaattttttatcctttgatttgatcccagaattttgcattagtcttatattccacatcttcctgttgaatgaatgataactaaatggaattttaaaaaatgaacctctctaatgataccctagccagtaataccctctgttaatatttccttcactaataaaatttgtttggaggtacaaaaagggttttgagctcatgtgattgtaggggtcatgttagacatgaaaatgaaaggtgaatgtgatggcaacttttcatatcgtcttgacacaatttagaattacctgaaaatagtcttgatatggggttgtccaaatctgtgagggattgtctcaatcagtgggaagctttttatgtcaccataaaaagaaactgttctggacgagagtgaaaaaagagaactgagctcagcaagtatgcatgtgttcatttttctctgctttcaagtagattgcactagctgcttcacatttgtccaatgatggacttagcctggaattatgagctaaaatagactcttttctaaattgcctttgtcacagtattttttaattaccgcaacaggaaatgaaactaagacagtgagtagaataagaaggcagtttgcaaagccttctgtaacgaagagggcaattgctgaactcccatgtgattctcctccacaaggatgtgacctcagcttattaaaaagaaaacatgagtatgatatgaaattcaattcctaatcttgattacaaaacacaaatcttaaagctaataaacaactttcagcagaatggcttatgggttgcaattaggtgatttttgataattagagatacctcgctaaaatatcctttccatgacttatattgcattaagccttgaattgaagaaagcctcctatatgaacatctctagataattcccctgttttgatgctttgacatgttagcattttagatctgtatcgtggtttgaaagaaaatggccccatatgctcagagagtggcactattaggaggtgtgaccttgttagagttggtgtggctctgatagaggaagttcatcactaggggcaggctttgaggcctcaaatgctcaagccaggtttaatgtgacattcacttcctgctgtctgctccagcaccaagtctatatgtgcaccaccatgcttccagccatgacaataatggactaaatctctgaagctgtgagccaaccataattaaaagttttcctttgtaagagttgccatggtcatggtttctcttcacagctagaaaccataagatagtctgtaatgatttttcaagttgaatctatgttctttgtctttctttaaatttcaatgtttcatatgagaaacttcaagttattaaaattaactagaattgtttctctaactttgaagttacttaaaagttgtcataatttcaaaatgcaaagtcttatgggcaactatgtactgtatatcctttggataatttttgaaaaccacatatgatacctttagccttagaaaccattttatatccagaacatacatcattcaccatttcagatgagtggcttgctcaaaaataaaacatgttttgtactgataattttcattgtagtccctgaatatgttggacagatcattagaatattgctacacttgtagttagataaaattaatatactcttgagtattatttttagattacacatggcctaataccagcactgattaagaacatagtagaaaatttgatatttattatcaactctatatctgattatggaactcagaccctgatcactgagaaagtctgcctctataggcaacagtctttagttccattttagtgggcacattagaattctaactatagccatcttttaagctgttttattatcacccttcctggtagcatattgtcactggggaagttagagttacttatatattaactttgactgaaaatttatgcactatttatgactcaatcatctattttgtcctttgataatggcttctcgatgccagaaaagggcaaaaatatttttcttcttatgtaaattcttccctatgggcataaaaataacacttgggttgacattatttcatcaacaggagataattcatttacgcattggcttatcattcctctgaatctctatctgacctgaaccatataatataggtgtcaaattctaaagcaaccatgcagtgtacacacctagtaatgagaactatgtaagactaatatgaacccaagatagatgggctagagttccttgccacccagcttcatttctgctctcacgtggacatcatgtgaccaaatatttcagctgagatgtgtgatttgagttggataccactttatcattcactaaatatgagacagtgagaggctttattttcatctacaataaagattatgactatgtcttacttctggggttgtcctgaggattgatcaaggggatcaatcaacttgtgaggcacttgaataagtacctagagcttacttgaatgcctcccaaaagttgactgttgtcatcactactgccacatcttcaacttcacctttaccttctttgctcccattctaattatttcattcttaaatagtttttttttagtccttaactggaagttagagtactttctataatcatcacaccaagatttcaagtcaatcactcattagtttgtaactccaggcaagctggctaacctctttccaattctgcacagtaagataattgaattaggtaacttctgttttcttagatcacaacctctgattcagcaatatgtggcctctttacagttggatcagatttctgaatgccaaaatgtagccccaagtcaaacagtggcatttactagcagacaactgccatcagtgtccttccatccagaaactacttcagctgttgccttttattctgaagacctgagtcacatgtcatgcctgttagtgtttattgacaaggtaacaagccaaagtcagtcttttagaagtctgtatttctccagactctcccctcctgggcacagtcatgagaaagttacttaatattctggagccagctttctggtttcatgtatttttcttctaaaatataataaaattataggacatagatattccagttaaatttagttatgattagtttatttggaaataagctgtcacatatacagtgcaaacctcttttctgtcttctaggttcacgtttctcccagtgtcactattgtgaaactgatactgcatataggcctataatattttttaactctttttgcatggacatcacctgtctgtgtctctccatcaaaaaaatccttctatcttttctttgcttttgaatagtaactaaaaaaatcattgtatggccagtgttgtgtagctctttattctgtttttgtctgttattcagttacaaggctcatgcttaaacagccattcatcctgaactgactggatagtcggtatattggtatacagtttgccagcatatactgacacaaaatcatcattgttaataaatgtaaatactagaggtttttgcatgttgattttgaattctaaaattttatgaaactatcatttttaaggttttgtagtctcttcagtgttttccatatagtagagggaaagatataaaggcacttctctgtagaaaagtatcttgggtgattcaatgattatttctcataaaagagatcagatatccatggattattagagatatcatagtattttttaatgaaattgtttccttattcaagctcccttaagcagagagtcattttcaatggtaaaaattgagctactttagaaaacagtccaatccctcattgttattctccaacatatcctccagacaaataattctcttcaggtatcacaagataagaaaaaaatgtaaatttgaaaaatctcttcaaaacaaaagtgtttcatttgaagataatttccctgtaaatgaactcttgtatctgtcatgttattccttccaaatctaaatgattgcgtcttaatttttctttctgtagtgtagaagaaaaatggctcattataaatcatcatttggacaggaaacatagatactaattggctagatttgttgttattgcactgaccacttaagacgcctggaaaaatattttaactatttgaaaaatacttctgaatattcttgccaaaattatatggctgaaacacatcacttcatttgtttattgtgattgagattgtgcccacatgagatcagcattgcaggtgggttctcatggttcttattcttcatacattggtaaacaagtgagacacagctcagtaaaaatataccacatgagatttttcttattccacattctagtaacaggaaaattacaagatttatattttagaatatatcaagctgtatgtcatggacacaagtcaactaactcttctaggatcattttgtagggcatcaacaaatagtttttggttgcccataattcagttagaaataatccattaaaaattgaaataaaagccaccatatactacatcatcaaaaactttgaaggggttagaaaaaacatggtgaaagatatgtcaatcttacacaacaaaaattatgtgacattccctggagaattgcaggatctttttgagaaatgtacaggatcattaaaaaattttaatgaaaataaaaaaaaacctagcaggactaaaacagtgcagtaaagaaagagcaaagttggagactaatcctactgaacttccatgtgccttaaagcaatgataaaaacaagacagtatgttctgaaattgagatatacaaatagatctgaggagtcgagaatctatcctacatgctagttgtttttctgtgacaaataccatagccaggtagcttagccaaaagaaacaaacttccctatgatttcgaggactgtaagtctaaaatcgaggacatcatggtcatgttctagtgacatctttctcggctgcagacttttgatatgtgcagttagagcatttgcagctctgggtatctcttttgacaagagttgccattccacaatgtgggtcccagtcacacaaactcctcacccaaagccaagtgtctcccaaagactccattttcaaaataccatcagtgtgagatcttctagatatgatatttttagtggacaccattctattcctagcatttgctgactgattttcaaaaaatggtcaaatctaattttgttaagaaatgttagccctttaccacagatggtgttgacaacattggatacacattaaatcaatcaatcaatcagtcagtcagtcagtcagtcaatcaataacttggatccataaagtgcatccttcacatgatatagcaaaatttaaaatggtttgcatgtgtaaatatgagttacaatttaataatgttttaaggtaaaggaaactattatagatttttctaaactttggttaggttaaaagttttcctagtaggccatagtggtgcatacctttaatcccagcactcagaaggtgaggcaggtggatctctgagttcaagaccagcctagtttataaagttccaggacagccagggttacacagaggaagcctgttttgcaaaaaagaagaaaaaaaaagaagaaaaaaaaagttttcttagataatgacattacatcatgtttctttagagaagcaaagataattaattagatgtcattaacaataaaatttcctaggaggttggcaagtagcttggtgatagagcctaccatgaccaccttcagctctaactccagcactggaaaacaaaatgcattgtgtaaaagccactgatagttatgcaaaaaaaaaaaaagatagctcttaaactggagaaaatatttgcaataacatacccgaaagcagaatatttttccattttccaaactcttaaatatcaacaatgaaaaagctaacagcccaatgtttttaaatgaatgagtgatctgagcccacagtttagaaaagtgatagcaaattagcatgaaatgttaaagatgactgatgttagagaaacaaaaaataaaactgatgaaatactttcatacaaacattagaatgactaaaattaaagcagttgaccctaccatgtgttggaggtatgtggtgccattagaactttcatgcactgttgatggaagtgtagtaaacttgagcgatgacttttttcttcaaaatttaaaataaaaataacaagtataccacttgccatccaacccacgcattgccaattctagctatttaagccaaagcttatgtttatacaagcatttgcacacaagtaaattttgttcttagtaacaaatagcataatatttgaaaaacttacatgttcacccataaatgaatgaataggtaaattgtggtataaccatacaatgagataatactcagcagtaaaatgaatgaagtattagtacactcaacaacctagatgtctattaaaataattgtaatgaatgaaagaggccagataaaagggagtatctactttgtaattccatttatctataattcctaaagatactaactaatctgtagatagagaacaccacacctggggataggagttgacataaattagatcatataaagagatactgggaaacctttagagtgatgcctacgttcattatattgattgtgtatgagagtgtctgcaaatgtcaatggtcttcactttgtgctcttcgaatatgtatagtttgtatgaatcagacctcattattaaacaattaaaattcagttaaaatcttaatggtatccttgaggtaatcaagcatgtgaaggaactaacaactctgtggcccactacttctactgttctatgcacatgagacttggaaatctctcattatgaaactaagtttctaattaatttaattgaaaagcttaattttgtggtgtaataattttgaatatatttatggggtaaatcacaactatatgatatataacatacatatgatatcatatatcatgtatgtaatgtattgtttataatttacatgtgattatatatcattatatatcaaataattatacgttatatgttataaataacatatataattataattttatccatatatatatatatatagagagagagagagagagtgatcaaattagtgtaataagctcttccacccctgcaaacatcaaccatgtctatgtgttgagaccttttgtgttcttctagttatctagttaagtatgtcataaattgtgataactgatagttactctgctgttctttagcaaaatagcaagttcttcaagctgtgttctgtttgcacctaacatgtttctacctctcctccacttccagactctagtgaccatttttcccatatgttcttttgtaagactgaatatttgtttatgtgtgtgaggtgatttggttcttgtctttttgtgtctagatttcatttaacataagtgacctccataactgcaactgcaaatagtagaatgtccttcttcttgtagctaatgatatcccattctctctctctctctctctctctctatatattatatatatatatattccatatatatatatatatatatatatatatgttccttttctatccactcattgctaagaacttggttaatttaatttttctttcatgaagagtgtgcaggtaaacaagaggttcagttatctctttgatgtaatgatatcatatgtgaagacataaagatatagatatttatagagagagtagtggattatagataatattattagtctatttttattcagtgaattcttaatacctttatcaaaactcagttgtctgtaagtatgtaagttaatttctgtctagctggtccatgtgtcaagtttgtttctagattcgtgaatttttattttatgtgtatgtgtgagcacctacatgtacggatgaacaccatatgcatggcattggttgtggaggccagaagagggcactgcatactctgtaactagaattacagttggttgtgagccatcccatatgggtgttaagaattgaacctgtgttccatccaagagcagcaagcagacgtttattttagatgtatttattttattttatgtaactgctttgcctgcacttatgtacatgtaccacatgaaggtctagtacccatagaggtcggaataaggaattggcttctccggaactagagttatagatagctgagtgctaccatgtggatgctggaaacagaatttgggtcctctgcaagaacaagtgatctctccagtctagcacagtgtttcagtagctgacattatgtagttattgttttgaaaccacttatacaaccactttgataatgaaaaaaaatgttgtagagttgaattaagagatacaagagaattccaagaaatcatgtacaaaaacaaatatatacaaatattttatatattgtaatatattttatgtaacatatatatgtatatataattatgtgtgttgttatcttccttattatgtgtatttcagggtggcttaaacttaaggcattcctctaaccttacctcctgagtcctgggaatagaagcatacactgtctttcccagttctggtcttacattttttcatcacttgttttcattgtagagatctttcactttttggttacatttatccctagaaattattgtagctattataaatataattaatttcttgatttctttttcagcaagttaattattgatacataaagtgcttctgtcttttatagagagagtttgtatcattaattttttacatgtttatcagttctagcagtcacttttattgagttcttacaaaagtaacatcacctgcaaatatgaataatgacttccagttgaaatttgggcgacctttatttccttctctaacctaattggctcaataagtatgaaaacattcatagcttcaaccttgtcccaggcctggttttccataacaaattaaatgtaattatgaaagtagtgtaagttttacacttctccctttccctttaagaattatgtttgtcaatctcacattctaggtcttttgtgttaaatgcttgtcctatgaggtatcatgggtactttgacattttctacaacattcttatgtgtctgcgctgaataccctcagaatcagttgatgaactttgctcactacccagatccctccccttccctcccctcccctcccctcccctcccttccatttctcctctttctttctccccttccctccctttccctcccctctcctctttctttctctctccctcccttctcctccccccgtctcctctactccacaccatctttgctgcactcttactcccccaaatgggaaaacatattggactgaaaaggcatattttccatagatgttaataagaagaatacaggtttattttttttcaactcatactatgcacttagtttctttagaaatatgactttcccatcctagagaactaaattttttcctttaaacttttaaaattttaccatcaaacaagaagggtgaatatagtatgtgcatttaaaattaatattataatttttaatttttccaataattgtgacttatttttcatgtgtatgaagataatataaaaggtgtgtttctagatttctaaagctatctactccagaataaaaatgactttgtaacatggaaattaaccacattatagaagcttctccatgaagccctactgatagtttataactttctcccttcctatatatattattctgtcttctactgtgagccaactattatcaccatgtccctattcgcatgtggccagtaatgagcctattgatccatttcccacagacagaagactaccatatttcacatttagttttgatactttctcttcttaactttattagaaacagttaaattattctgtaactacaaaaatttcctcaattttctaaagtggggagtcattacaaatttaattataaattaaaatatcttcttctggtaacaccaaagtatctaatgctgctcagccaaatgattttgtttaaaggaagaattaagtgtgacaatgggaaatcatttgtaagcagctgatgaggtggcttgtatttttaattttattattccttccacgattcagagtggactgtggatgtctgcatctctcctaagagttgaatatactaacaggaaaatttcactggacaacagcctttggggaaaattgtctgtctttgccaacacatgcttctctatgagtttctctgttaaaagcacctttaggtcccttgtcactcaggcttgagttttaaggacagtctctacaactcttctatctgatacagctctgctccttccgtctttggtcctccaattttattgatgattctacagtattctcatccatttcctttttttcaattgcactttttcactgtaattaagacttttttccctaacttgcatttcatgacatttagatttattttcatgtgacttatatcccagtatatcaagccactaccttattaggcccagggaagcagaaaccctgctctggacatcagcatcaacttcaggtccccgagtctcctctcagctatgattctttcctaatgaaaactattttgttgttaactgctgtgataaacaccatgactaaggcaccgaggcatcttgtaaaagaatttgggttattagtcccagaaagattacaattcatcaaggctgggaagcatggcagcagacagcaggcccagtggtagcagcaggaagcttagagctcctccctccaaatgcagataggaagcagagagggtgacaggaaatgggataatatggtgtcacctcaaagcctgcccctagtgatgtacttcctgacaacaatacagcaccatctattcccacccccccccaccccccagactcccctcacctcctcccaacagtgcctccaactgagaaccaagtgtttgaataccagagcctgtgggagacatttctcattcaaatccccacagaaagaaactttgtagtcaggaagatatgtccaccagaagcctgctcagctactcgttgaccatttgtgggaactaagatctagggcatccttatccttttaaaatctgggatggcacttttgccatgcccttcctagttaatacctctttaccatttcatgtcctgtttatctttcttggtatattttgactgagcccttaataaatttacttaagattatccaaccaaaagtgatccttatccataaaggcttgtgtcccattttaaatacatcacatatatcacaagtgtttaaataagtgttgaattgctgtggtgaatttttcagtgcaaaaagtttataaggcggtccctatttttgaagatggtctctcaagtgggagagatgatgaataacagtttctgtggtacctatacttctgccatggtgatgaatggaaagatggaggggacatgcaaatatgtcatactgctgttccagccctagcataacgtcatctcacagtttctctatttggaatttgcttgatacccatattccaatttgaaaaaaaaaaaaaaaagctgcattctttcctctgtcttagccttttacattcatctttcctacagacaagcatttagtggtatttagaattttacactggtagtatgtatataaaatattccacaacaaataatgagaatgtatcctgtattttttaaaacatcaattttggttgttctttgttgttttaaactttcctctaaaatgtaacccttagtgaaattaaaggatgaattattctacaatgacagtgttattgttgttatggcaaataaaacatgtatctactcaagacatggtatatgcaaaattttgcaaaaaaacacatgtaatctggacttaattatgagtcatatagtggggtagtgagcatgtaaagatgtataaaataagatcatttagaaactgatcattattcaaatttaataacaagtgcactatcatctgttccttttttctctttttctgtgtagatttaaatttccataacacagtgtgactaaacccactctaatcttagcttgagattatttcccacaagctcaacttctatgaaataactaaaattattcttgcatttttcctattacaaatttacactaaacctagtatagtattttataagttgatgctaagtagatattatttggaaaccatttatacaatcatcttgctaatgggaaaaacactgtagtgctgctaagaaataaaaacgaggaaatgccaagaaaccatatcatctggagaacatcaaacaggctcacattatattttataaaattatttctcagtttaaacaatgccagaagatgctttctttaataatttcatgtttaaataattgactttaaagattataatcaggaaattactcacgtgaaatctccactgtgtttcacgaagtggctgactaacaaattcaggggtaagattagtaagatgaaagaataaaacaaaaatccatgttttcagtggctgctcatatctcatcagaatgctttgtctaaagaactctgggatgggtgtgaaattgcccaggaaattatatgtggatttattttgtgttcaacctgagtgtgaagaataagttctagtctagtgatattagtaaatatgcctgcaggtataaagaagcaggcatgtctgcaggaacatcaagcaagttctaaaacagaagcattctattgcttattttcttctgccggggctggactttaaattgacattttatgttttgaactcaagtttatatgagtagtcaataatgggagctcatttgtccctaatgggttgtgaagaatgttgatgaaggaatgtggagaggattctctacggaaatggctggtttagaacaccagctaatgaagaagataaacggagggtgagggaccactcacttggtaaataactgctgcacaagcttgagacccgagttctgtcaccagaacccatgtgaaaggctgggaatagaacctcacacttgtcatcccagcatcagggtaggcagagacaggcggataactggggctctagggctagccagccagtcaaatctagttgacaacttctagactactgtgaatactgtttgaggtaacaaggtagatcatacctggggaacagcactcagatttgacttctggcctctacacttgttggcacacaagtgcacctaaacatatgcatacaaaatcaatcaagaaataagagcaataacatttgctgtaatgcctgaaaaatgaatgtcatttactaaatgcaatgaaacaaaatttgttcatacaagatgcattctaggcaaaggagatgaaagaagaaaagttccaaatgtattacatctattgtgatttttaagttctttataaaaagaatatcagattctatttaaattcaattttgaaaggttcacaggtcttcagggatttttgctgtgcctcctttagagttatattttgtcttagattaacatgtaagaagcaagactaatgtggaaggcatttccatattgctttttcagtttggacattttgtcacagttggttcatgatcatctttctcccctttaacatactggtataaatgtgtttacactttttttcattaagataattctttttctgcaccatgtgactatattttgagcatagtatatatattgtcttgttcctaaaaccaccaaactctatctattaagaataagggtatttatttatgcagtatgtgagtagttagcaaattcaagaaatttgacatagatataatatctcacttttggtgccacttaatttgggtcagtcttggtgatgttaattattcagatcactcagttataaagttgctcctcttctccactgaagagtatggaacattattttccttgtagctaataaagtgtctgtagaaagattgtatggttcctcagccaagctagcatgcctcttgagttagtattcattgagcccatcttctacaagattgcagagaactgccattatagtgttgttccatttgattaattatcactaagcttacagattattactttactcaatgtgtgatcattgcttcgaccttcagatctgagcagctgtgatttatccatttagtcacagcattaagcaggtatagcccatccatttagcctaactccagaggctagcatgactcaaattatttcttgatagcattcttacagctcatatacaccagcctctttttgcatattcttgactcatttttttcttcaggagtcctgcttcctttagtatagaatgatataaaatgcatgtattcttattcactgaatgaaaataggaaatctggacctgtatatttttgtctctatatggtgtgtgtgtttcttatttattcattaatttgatttttttcttaagtgctagtatgatcagcatctagtatctataggctatataaagtgatggaattgaacttaaaaaaagctagcaacaagcagtaatagtagaaatagaataataaaaagcacaatacataactgcgagaaattcattttatatttcaatatttactaatcttattttcatgagttatattttcttgagttaataattttcagcaacagattgattggaaaactcttttaaagatgcatcaaattgaaatctttatttttccctctttgcaggtgtccaattcactgtattcttaaatgtgacaatgtctttattatgaatgaaagatcttacaaaatataccatgagtaatcagtcactatttcattatgagagggaaatcacaaatgaatgggcaaggaaatatggatagaagcagagatatcaacaaatggatggagtgatggatgatatatagaaaataagtatgaatacatttatatttgtgggttaagatatgtttgtatagatgagcatatgtgtgtatactcatgcacatacacataacatatataatactgtgttcactaaggagaagtaatatcatattctctataaatgcccaaataacattattgagtaacagagagtaaaactctttggaggaatgaatgacccagtgaagaaagatacaggatgatcttgaaacatcatagaaacaaatgctttggaaaaaaacaggtacctggtaactcaaacattgaacgacaaatactacatgttttcccttatatgtagattctagttttgactccttagttctgtgtgtttaaattgtgatacccataaaaaacagaaaactactaagaggcagtggggagatatttcaagagaaggggatagaacacatgtgacatgaaggttaaaaaagtgaaaatggaacaggaagggttgaatggagtagaaaatggtagtgaagggaaacagagtgtatggggaaagatatctaatactggaaaactttaaaaataccacactgaaagctgctactgtggaatacacacacacacacacacacacacacacacacacacacacacacacacacacacacacaggttatataaggggtttaaattaagatagcaattcctcacccagacaccatagcctgccaaataaaaagcccagtgtcaagtattggttaccacctaagtaacccataagtggccccaaacattccgggcaattgccaatgctcttgaatacctcacagatctttatggtaagaccctgatacagaaggcatcatatacttgagtcatagaacatggaaaaaatcaagctagtactgacctggaagcttcatcccaactagatgctctcatacttctagaaggtacagaggagaaaataatcataattcataatatagctgtgaaccctgggagatacaataatgactagcataatgagatatgcctgttggtacaatagtggcaccattgatatgggagtaaccaaccatattctgatttgatttaaagcacagttcattccaagaggtcgatcccacgtctgatactgttagttgggtaagttgtaggccctatggaagaaacaagtgctattattccactaaataaactgctcccaagttcttaacttgtaagttaatgcatcttgcaacccttatcaaagaagcttctttatgcagtagatggtgatgaatgcagagactcacaaccagtcaatatgtagagagaaaacaactaggcagattctagctttaaatgggctcaggaatgatcatgggaaatggaatggagagattgttagatcagagggagcagatatctgtagcaaaacaattttttgccagacacaacacatgaactcacagtggttgtgactgcaggcacaagatttccacaaaatcagaccatccaaaaatcccagaatagatgggggagggggctcacacacttccacctttggggagttgctggtaattgatggcacctgagggaggatgagatagttttagtcctggatgcagaccctgagattctagttatggcaacagatggtccgacacctgcataaatataagtagaactaaatagacttggtaggtatttaaaaagtgaaagacaggccagtggtggtggtgcacagctttaatcccagcactcgggaggcagaggcaggcagatctctgtgagttccaggccagcctggtctacagaatgagttctagggcagctagggatgttacacagagaaaccctgtctctataaaagtgaaagactgtacatgaaattgggagtaaaaagtggtgatggggaataggataggaactggaagagagggaatggggaaatatttgatccaaacatagtatatacattgatgtgtattataaaatatgttaaaaagcatttcacctgtaaaattggcacaattaccaacatccaaggctcccagtatacaaatagagaataatctttgtagcaaatcaaatcatgataacactggaatataaaccaagaaaataagtattcacaagtgcatgtgtgtataaataattgaatgaatgggaagaagggaaaactgttctgtaggatatgataaactaaatataaaagaagagagaattacacagtggccattaggtcatccacacaatgattgcttcaggccaaacccactgaagatggttgaaatcagctggatcttaaactgaaagcagaaattttcagtctcaaactattttcctcaaaatattcatcactaattgaggtggtgttttgcatatgtttacataaaccacggatcaattgtttcggagcctgtgtggtaggtaatcactaattgcaatgccttttggcaggctctcactattaaggtttcattgggtcattatataaaactaatattcacaaatgaggttgtgaatggtgaattgctgagaagcaaaaaggttttttcaaccttctgataagatattttaaaataaccttagcatgtgaagatgataaggcaaggggtccaatgtccattttttttcctatttctgcttgataaatagccatgagtttgggagattaaaaataacacctgcttacttagcctgtagttctgaagtaagaattacctttagactcggtggagttttctggagactcacagactggaggctctggaatctgagggaagaatcagtttccaaaatctccgttgctgttggcagaatccaattcctggaggctgtaaagttcagtttccatttcccagttgatggtcttcagcattaaacagcattgtgtgcctgttgtttactttagaatgtttttctgcttcaggttagacattgctggattttcagtggtgacctgtgcaagctcactttatctgcctatcttaaaattacccctgttatgtgacacaatctactcaaaagaggatctattcatagatttagggaacttggagaagagaatctttgggaaaatactttaggaattccacctgtcatcacagcattatgtttaagatttagtgcttctctcattcacttttgttcctacctggagggcaacctaaatgtttgcccctgaacaggatgactttgtgtgcaacaacatggtccaccatactaactcctgtcagtgggacatgtggtgtcaggctgggttggatctggttttattttgtagagaatagattttcttttgtgacagtgtttctctctatagctttggagattatcctggaacttgctttgtagacaaggctggcctggaattcacagagatctgcctgcctctgtctcccctagtgctaggattaaaggcgtgcgccaccactgcccagctgagagtagaatttgagctagctcacatttaggaagttgaagatgtgttgaaagggggtggcaaaaattcccaaaacacattgtacaaagttatcatagaattaataaaagcatctttaaaaaaaaaaaagtagtaaggaagcgatctttaacctatcaccatgaaatttgacagtggtttgtacagcatcaatcccaagatgcaaaattgttttttcgaatgccaatcaggtatttacttaattcttagaaaaatggaaaaggttgtgacagtaaacctgacttgatgtagctattgaactctcccttgattacaaatgagttttcgtgtggcaacatgagcccttaagggtttacttgaagcacttaaattaaattcagtttggtttctcctttgttcttcaaacataaatgcagatcaattagttctttattgtacctcagtttcacctgtaagtgaggaggcttcaaacagggtttgtgagagtgagtacatgttgaggtgagaatgtctcctatgtcccttcagatgtgtcacaacttatttacatcaggtactaccatatgctaattttatttaagtgaaatttcctatatattctgatttttggagcatagtgcttagtgcatactacaatttgaaggatgatagattaacaatagatttttaaattattattattagttgtaggggaagctgtagccacacctacttaggggctggctacaggtgtgtctgaccacacctgagggcatggtcagggtgaggtagaatgagaggcagtcaggtgctgagcactttcagtttcccttttcggcttgctgtacagactgctgcagcaccagctggctaggtcgctctgtaagtaaggcttttccctattaaatacccttgtatttctacctgactccgtatgggtaatttctcacattaattagtgtgtggaggctgtgcacacgcaatggcacaaggcaagcagtcagaggacaatttgtggagtggagtcactttacacaggttctggggattgaactcagattattggacttgcaagacaagcattttatctgctgaggcaggcatagccccagccctaagaacagattttgtgagtgtgtgtgtgtgtgtgtgtgtgtgtgtgtgtgtgtgtgtgtgtgtgtgtgtgtgtgtgatattcttcgggatatgcctggaaaaaccctggctctgattgaaactatgattcttttctctgacctccaaactttcattttgtacatatgattgtatttctgggtggtagcctaagccctttagagacagtttcgaggtacttcactgagatttacccaggcatgtgcattcattgatccttgacccaagttgtacttctcattgaaacatagagtttagaaaatgcatgagtcctcatatgaaatcatatgatgggcaatctccaaatctgaaaaattgtgcttgtattatctaatactttgtttcattggttaacaaagtaattttttagctaagttctatcaccccacccctatccccacacgcacatgcacacttaacataatgttggttttagttgtttttgagttttggttgttttttcttatccttttcattgtgtgtgggtgtattgacaagagcatgttgaggccagagggtaacatcaggatttcttttctcattcacattctctgctgtattttcttgacacaaggtatctcactgagatcaagttcagtgtttcagctcgcctggctgggcagctagacccttggatcttctagtttctgcccttccacccatcctagcactgggtttacaggcacgtgccgctgtgcctggcttttatgtaaactctcgggatctaaactcaggtccttatgcttgtgctacagcactctacctaccaagccttctctccagctccctagatgaggtgttgaagaaagctgcttcaaagttgattgttgaaaagattgaggaactcaaaatagagtagaatgctaagccaattcataaataaaacgaatgaaacttcagcttccctggaaatatggattttctcatgggagttgcctgcataattctttacttgtgaattataaaaggactttactttagaattcatctggagtctttgctttaaatacaaactactagccatgagagagtaaataggcacataggctcaccttctcttctgtaaaattaggtgataaatggtcttattattcaagtgaatgttcaagatgatctggaatgtgcaccattattcgaaatttactggcatacatttaaatcttattgttaggaaggacggcaaccattactttactatcacaataatgacttggtttggggaagttcatgttcaagtaaccctttgagatgtactgatggaagtaaatatatttttgaaaccctcttggaagtatcagtgtgcttaactgttctccttaattgcttttatttttctattagccaagcaagtaatttaaaagtgaaatcaatccaaactggctcttgcagcttaggggtcattaatattgtatattaaaacatattatcttttagaataaatagatggcatgaatgaaaaagcacagtgaaaccaaaccttgaaaataaaatgcagcctaacttactgtacacggaaaggaatttctattttaccttaacaatcacctccaatcagagatgactctgtaattaattaccttactcagagtaaaccacattaatgcctcccttattcagatgcttccttccattttgaattatacagataattatctttgtttattacttccatttgttagtgtaggcttttaccttgggctaaatcagagcaaaaatgagaccttttgatgtatcttaggaaatccaacaattaaccaatgttttggaagattttctaatctattagaatgtaacttttatagttttagactctaaaagttatagatcccatctgagaaatatactataaactaaaaatgtgcacataatcaaaggacttacagacactccccaagctgtcagcataaaccaaataggagaccctatgtctgcagaagtcaacttactgctattttctagtcatattgaagaaatgtcacctactaaaccctgagatgcatgttaaaaatttattcagtcatagaaatgttgacaatatctgcttaagggactgttaactttaacagaagagattcatggaatgattgtgttgaattggtagaaatattctcagagttttaatatgcttaacctataatgttttgcatgcaataaaagatttcaaattcactgtggacctcaaagccaagtatgtttaggcagtacatagatagaatgagacttcagtttccatggtgaataccggtttgacgagggcactatctgtgtaatcctttatgtgtgaactatagggtgaccaggcttaagaattagtactgatcaggagtcctgttttgaatctgagcaactaaacttgtagccatggaattgaatttattcgaattatacaattctactgttaatagtcattatataactgttcacttcctgattgtcaataatagtactaatatattttctcatcagctgtataattaatttctttctttggtattttttaataagtacaaattaatgcatccttctatcattttgtgtgttctctctcacatctctcatctacataaccccagtgatatcctagtacatttataccgcccattctcagatatatttttgtatattagtaattttattttttattaatttttccaaaacagatgaagcagaagagacccttctcaggtatttaagaagccagccagtaaattaattgtttgcttgaattgccatcacaaaataacatagactaggtggctttaaactaaacatttatagtctcacagttctgaaatcctgtggcagcataacccattctgaagaggctgccttttggggggtagacagctgacttcatgtgtgtattctctcaacagatgcaagaggagcacacaagttgtgtgtgtcttttcttatatgtgcactaatcctgtcgggaggtgtccattcaggagaacccatataaacctacatgaattcccaaaccctaccaccagatgattctgcttaggggcctaggcttcaccatgagtttgggagaaccatgaagccttcaggagcaaattcacttgagttggagtctgttttattggattcaaactctttggcccacttaatacttacattttgtcaatatctaaggctgttgatttgggacacttcattctgccagcacgtggtctcacagttatggaagttgttggtcagccctgcaccttcccagccctctgttcatctcctttgcacgtattagccagttttcctggaacatacagggcactttggggttttgctcagcccttttccctgcctggaataaccacctttgatacatttgcttggataaattactcttcccctttagattctgccttccctcttatcatctcagtgagactacttctgatatcacatttaatttctgttcccacacactaaatcagttcatttctggtcccccttaccccttttaaaatagtttcccaccataactacttcctttgaatagattatataatttgataatttgttttagttattcattgccaattctcagctaccaaatgaatatcagccagagtataaagcacatgaagactgaggccaggtatcattgtctgatcccttcattattacatcctaactttagataacaatatctaaaaatattaatgaacatactttgaaatattaaatgaataaaactaaagtgtatttatcatgaagccagttgttccatgtagtggggctcttcctggatagatgtaaacaagcatttattcatcccaggacatatttttaaagatatgtctttcctctcctgaacaatccaatgcattttatagtccaggttttctgtagctacagtttgcagttgagtagaaacaggctcttctctttgtcctggttcccattctttcagagcccctggaggcttctaggtttataatacttgaaaaccaagcttctccctctaataagggaagacctctgctctgtggaatcaaacccacttgattaagttgatcccccactcctgagtccttagtaaaaacaatagaaatgctaggagttttaactttgtttctggcttctcccttcctacagatatcagcaaagttgttcctcccaacaactaccatgcatttttttattatttcaaattagaaacaagcctgcttcacatgttaatcccgtctccctctacctcccctcccctcctcccctcctcaccccactagccctccaccccatccaccctctgctccccaaggagagtaaggccctccatggggtatccccaaagtctgtcatattatcccgggcagggcctagttcctcccccatgtgtccaggctgagagagcatccctccacatggaatgggctctcaaagtcctttcttacaccagggataaatactgatctactaccagaggccccatagagtgcagaggcctcatcattgacgtccacatttgggggggggggtctggatcagtcccgtgctgacatcagtatggaatccatgtgctcccccttgttcaggttagctgattctgtgggttttgccagcctggttttgacctccttgcttttcactcttccctctctgcaactgagttccagagttcagttcagtgcttagctgtgggtgtctgcctctgcttctatcagccactggataaaggctctaggatggcgtataaagtagtcatcagtctcattataggggaagggtatttagggtagcctctccactattgcttagattgtcagttggtgccatctttgtagctctctggaaatctccctagtgccagatctctctttgaacctataatggctccctctgttatggtatctctcatcctgctctcctctattcttccctggactcaaccttcctgctttccatttcctcctctcccttcctcttctccccctttcattcttccaggaacctctcccctacccccatgctccaagttagctcaggagatcctgtccccttccccttctccgggatccatgcattcttcttgtagagtccttgtttcctagtttctttggtgaagaggattgtaggctggtaatcctttgctctatgtctaaaattcatatatgaatgagtacatgccatgtttgtctttttgtgactgagttacctcactcaggatggtttcttctcggtccatccatttgcctgcaaatttcaagattccattgctttttgctgccctaccatgcatttttaaacatttcattttctctcatgtttatggatagtctgccagcatgcgtgtctgtgaaaacacatgtgtgcagtgctcatggagtccagaacagggtactggatgctctggaactggagttacggaaggttgtgggcagccaccatatgagtgctgggaattgagcctaagtcctctggaagaacagcctgtgctcttaactgctgagctatctctgcattcacattttaacttattcttggagaatttttaccagaatgcaacacgttttgataggatccaccccaactctccccactctcactcctccaatacctaaccaccaccacttctccctcctttacccaacaccacaacgtcttgctctccttcttaaagctctgagtcctcttagtgcaacttatgtatgcatgagtgtatggccatccactggggcatggacagcctgtcgggggccacatccctgaagaaaactgactcctttcccaatcgaccatcagttaccaatggcttctaagctaggggttgggtttcatgagtccctcctgtctccactctggaatttttattgttagatcgtgtgctggtcttgttcatgtagtaacagctactgtgagttcctgagtgccacacccccattgtgtactgaaagcactgtttcctggaagtcctccactgcctctgctcttatggtctttctgcctcatcttccataatgactcctgagtcttatggggagattgtattatatagatgtcccatgtatgactgagtcgcccagcctcttattctcaacacattgaccaattatgggtctctgaatcagtctctatgtactgcaaaaagaagcttctctgatgaggcttgagaactgaactagtgtatcaacataaggataagtatttagtttgttactatgtctatttagcagaatgataatagttggtttcccctagtgcctatgacctacctagcaacagattcttggcccagctaagaataccaggcatgagttctgtcttgtggctcaggccttaaattaaatcagaaaagagattgattaccccaattctgctactataacattactatagcaccaattggcatctcttgccacactggttgttaccataactacgagagcacagatagaaaggttcttgattacatctctcccctggaggtatagatagaactttctgaaactatgaatgttgatcattagggatgaagcttccaggtcagaacttaccagagattttcaccatgttctatgactcaaaggcatgtgtctccaacaacggtatcttatcatcaatttgtagaggataacaaagagagatggttatattatatattatttggaggcctatgggattttgcactgtttgttacctgatctttcccagaaagtgtgtaggcataggcatatgctcaatatgatctatgtataattttatttttaaatttaaaatgcagtaggttcataggcaaattaaaatgaacttactccttttggctgttgaatatctaaaatagaacattgatgttttctttgtgtcctactgatatagaatcatgagtttttgttgttgttaacctatgtgtaatgactttttgctctagattggatgatgttgaggattaaggtctgttagttcttataatgctggggtagatcttaatgtatacattctatagattaagaagttaagattcaaacttctttttttttaaaaggcccaaagtcaaaaagctagaatgatacaaaattctgatttgaatctagcatgtataaccatacacatatctacatattctttccacttgaggcagataattagagccattttaatgcatatttagccactaactattaacctattggagcctttgaaatacacctctagtggattctgatttgtacagtttctttggaggaaagagggtaagaatggtttctatcaagtacttattacctgccattttggcttatacagaagttatggaatgtttgattaaatttcattcattaaaagatattaaatttctgcatttgtctgcttaagtataaagttggagcaactttgaatgtttaatgattctgaaataattttcattgataggacaaccaaatttaatctgactaaatgctatgatatctcagttcactatttgttttgattttttctttgctattctaatcttacactttattcctggcatttaattagattaagctcggttcattaacatcttttgaatactaattgattccgcactaaaagggctttgttttcttgtaaactatttgataagattaggtatcattgcatcctaaatttaattattgtactaatggagcagtgattttcatatgtctaatatctgaatactgattaccaatggcttcaaaagttaaaacacagttggaagggcttattacttgtatcactaatttttgtggtacttactcactgtagaacaggaagcttgaaatccttggaaataaacatagagattgtacaatatgaaattataaggtgaatgtgttgttacttttgttcacaggaatagatcactatatagacaattatcacatgtaatatgtaaatgaaattcaaaattatggtttgatacgaaaatttcagtccagtaaatatatgccctattacaaagtaaaacaattttagaaggttaattcagcagacagtttttttttttcaagacagagtttctctgtgtagctctggctgtgctggcacttactttgtagaccaggctggcctcagactcagagatctccctgcttctgtcttccaagtgctggaattaaaaggcatgtgccaccatgtctggcttaaaaacacttatttaataactcaggaaatactgaattttacttcagaaagatgtctcaactgtgtttaattattgaaatttacagtttacagaatagtgtatttgatattcctgtgtctttttatagagtaagtttcaacaacttcctataattacattaaatgttcatgaatactgaaaaaaatatgcccctcttactatatgaacatttctgttggcttgatggaggttctgtaaatgctgtaatgaacatgtaactctcatttttaaaatggagtgctggagagaaggcttgactgctgctcttcttgcaagtagtcagtttctagtgcccacatggagcttacagttatcatgaactcctgttccaggggatccagcgccctcttctggcccctgtgggccagcaagcagtgaatgcaagaagagaatttgcattcatgcagtcaaaacactcacacacatagaataataataaataaatctaaataaattcgtttgatcaatatgaaaagtttgttttatattctggaacagttgttaaatgctttgaaagtcaaaggactacatatgatttggaaactctgtgtgtctggtgggggtagaggtatttcttagcttgattaattccttgagtttgatccctaatacaataagaactaaatagagagtaggaagatagatatatgattgtaaaatatagaaggagaaccattggaagtgatatgagaatataaggttatacaagaccatgccagactcagattatgttgggaaagtggaattttccaagaaaggctgatatgaaatgagtatttcagataaggattaacactttatctccaaccacaaaacagtaagtaggatttaatggtggtatatgtgttcagaatcatccaagcatctaaataatagtcctagtaacctgtcctatgggtctctttatgacaaagtaataaccaaagtttaaagatcaatgagaaaaggcagaggaagtgattaaggccagtagagagcactagagaaatttcacaacaaaaacctcaattagccttcctaagttatacttttaaaaaaatcattaagtgaaaataaggaagaaaaggaatcccataaaatgagtgaactgtgatacattacattcttcatggatagttggggaattctgtcattatgctgaatactttcaaagagactctgcaatttgcattctgttagttgacttgaccatgtggttaactgtagcaatggggcaaatcctgtatctgtaaagtagaggcaattgatagccagtgtgcagaatattcaaacagtgctcctccaactgtgatgaaagatgcaggtttatgtcaaggcattctctacaggagtgtgtggagattcatgaaatacatgtgtcaagaaaggagaatgacaactatttggggggaggagtaggagaaccaagagaaggaggaaaggggggctgaggaaggagaatgggaaaccaaaaagtaatgatgtgtgtgggaatgtcacaatgaatatatttctgtgctaaaccaattggtacaaaatataggaagagaactgagtgatcattttgacaatgcctagggagatcactttcttccaatggtcatctccccctatgtcacagggtgacacaatcatttggtgtgggccagttgctacaaacttgctttattttctttcttaaacatttgtataatcttgggatgactgaaaagacaatcagtagtcaaagaagaagagttaggagggagaaatgtattgggaatagaaagggtggattacatggcactcaaaagtgacaatccatgactaaatagtcatgttttaatgttgctattgcttcctttacaatctcaagtttagatcattggtgtttctgtgttgtcatccagaatatactcactagaggttagatagaggacatgaatcaaggcttctacatcagaaacaatttgataatattataggatttggatcatcttataatgtaagtcagttatgttggtgaataaatatgtcttctgaccttcattttcaaaattcatcctagaatatgtctttgcatttatagaacatttctacaagcagggataaaatacacaagagggcttgtttttgtgttgccttcctgccttgatatgacaatagtaggtggtttgaatatgtgcttacacggaatttacaacaatactttgcacataattgtccaaattgtatttgtttatttcattttcagatctgaaaaatatagaacatggaactaacataattttactataatcacatctcatatttgagaattctatttagtctattttacatacacagatttatattgagtcaaggacccagaatgacattttcccataaatattgcaccaagactttctttgagtcatatccatattgcatagatttatataaatacagggaagaatttcaattttgcagaaattaagagcattagtgatagaatttccaatgataaattaatccttactctaccaagtgtttccctaaataacatatgtggtttgactctattaatctttagaatgattcttatgatgtagacagttattttaagagtaagatagctgaggtctagagaggttaaaatgtcttgttaaaggtcacttagccagtaacagccatagtcaaaagaaatcaatacatactgtttccctattgctcctatacaaatttttaactgctttaagaaacagtaatttaagggctggggaggtggaccctctgttcttccagaggacccggtttgtttcccaggacccacacagtgtcctcttctggcctccacagatactacttacctgtgctgcacagataatacatgcaggcagaatacccacatgcataaaaataaaagttaaaatatttcaaaactattcagcatgtcatttttttcttgactaggtatgctgcatagaacatgggatacagagattatttagaacttcagataaacaatggctgaatatttattgtgtgtaccatgaggaggtactgaatcggtttttacatgctgtacgaggcagcattccctctccagaaagccacagttggtgagaaaaataactggtgtgtatgtttgctgcatcttcagggaacagcctgtaagcaaggaagccagttctaacctgtgagctgtgggctggcactgtgagaaatgaccttcatgagggccattaacgtctgcaggagaaatgttgagttatgggagtttgcggttacatgttctatttcttttgaagctacaagaggaaattgtgaggacaccctttaggaataatccccaaactatactgttctttgcgtgtgtttttaaggtaaattatgtaaaggtaccctttagccacactttagtagcaagttactgacaacactgatctcttcatgttaatacatgtgtggttcagaagccctggccttgtgatgacattggatatcccattctcccaccagtcaggaagaatcagaggacttggagaaaggttcattcaagagattgtaagttaattcgttcttccagtcacacccaagaagaactgaataacagaatataatgtgatagacacttcagagtaggcatttatcagatagaaaattatcaaacaagattttacccagaagtaaaaggagaaagagtttctgagtctaacttaggagctatggacaagtggatttgtggggagggagaggcaattttctttaaggtacaccctggtacataagacactccaaggaataccccactcctagcaatatatagatagcaaaaaaatggacttaatggcttattttaaaaaacaaagacagtgtagaatttcagggacaggtagtgaggtggggaaggatctgggagaagttaggagaggagtgaatatgaacaaaaaacatcctacaaaattctcaaagaactaatatttttaaagtcctcctttggcatagtgcatttttgccaaaaatcccatacctggagaagatgcagctgtagtcttctatgttttaactgccaaattacagtaaagaacctaggtctataatgaattccagagttagtttaaatatctgggattctcacctgtgcatgggagtttgaagatgatatttttacataaaacttgctgggcagttagaaacattcgggaagccatctccaaccttcacgacatctcaaaatactcataaccgaaactattgcaatgtgattttaaaaagtctttataaataatcacttgaacttttatttttttcttttcacttgaacttttaaatgttgccctttatctcttatctccatgtccagaagttgtcatttttaataacaactgtacaacaagatggcaatgtgttggaaatttcttactatgtaatgtgatgaaacacagacacttgtttgcctgtgggctgtagatggtcaccactgtacatagtttccagtgttaccttgaagtattattcattgattaaatgttctgtaattcctcattgctttaacctatgtgtcatctatgatttgtattatgaaatattcaaataatcacttgagctgtatcaggatagttaaatgagtcatgaaataactgatgttatataatagaacacatatcctgcagttatgtttccaatggttattttaaaacgtatctacccctaataactctctctctctctctctctctctctctctctctctctctctctgtgtgtgtgtgtgtgtgtgtgtgtgtgtgtgtgtgtgtgtgtgtgtgtctgtctgtctgtctgtctttctctctctgtgggtgtatgtctcactctacctcttatctttctctttctgtatctctctgttttctgtctatctctccctttcctctctctctccctcgctctttctctctctctctctctctctctctctctctctctctctctctctctctcagacatacattgactatattttacagagggcagatgaaagatgaatgaggttaaaccatagcttcatatcgcaaaagtactaaaggaatatgtgttgattccagttttactggtcccatgtatatttcctctcgattcatccttatccctataaactctcagaaagctttataaaatgctaaaatgtccatcagcccaatgaaactataacaggaaagtcatgagtatgacagagttatagttgtcattgtgttccagctggaaaacatagccttggtagaaactcttgaatgtgcattttcaatcgtctttgtcctgcccctatgatgtacaggctttgctagcaggcagcaactctgcctttgtatcacttgcatatagtgactgtcaaagatgcttaggagtggcttgtttaggagttactacttaggtggatcatcacatttaaatagctgaatgattctcttttattatactagaaataattgaggaggaacagtttatttgttgtgataatattcactaaattgctattagtctaaaacttagacttcaactttatagattatagtgttttcattaaaagatagcttgttgaaggtacctgaagtagttttgtgctaattttgagcaatgataatttaggtaagcatgtagcaaaataatgtacccagagtgggcacacaagaatcaagagcttcagtaacagagacttttctgtaatgcctgagtgtacctgtaccgggaatcactcagaggtcttcatttagattaacacaatgaattatcaccatgtagtataagcagggttccattttcacaaacaagtaatatctggcacagagaggtcaagtaattggtgtacattctataaccaggatgctccagaatgaggacgtttggactcccctactcattcctcttttcccaccctccctttatttctctatctttaaaaattgttgttgtcagtgttgttttagtgctgaggtttgaaactaaagctttactcacgttaggtgagcactctatcactcaactacattgccagccaactcttctagtctcgtcatacttctccgtcacatactatatgtataggagattgcggatggaaaggggaaatggtatagtgttttagagaagtgattttagttatataacatgtaagcagtttatacattgggactggcaaatatactaaatgcaaaaaaaaaagaatcagctattttacaaacactttttaaaaagccatttatgtccctttgcaatgtaatgacagtgtttgctgacatctcattctggactagaggacttgcagataacagaagatagtttgtattgtgaggcatctgttattaaaatctcttagtcaagatggtagtgatttgtgttttaaccagtctcttgctttgacactaagagagaatttcaatataattctaatattaggatctgacagatgactgtggctatgtatgtcagtgggaattttgcaatcctatctaattttaggctttctctagatataaatagttgttcttgaggatcaaggtgaaatgcctctatgctcaaaagtttcctggacacacttggtgtggtgtcatttgatagctctttgcttagtgtcttatattagtttggccctctctctgggtccatccgagatctggctcctgcctcttgcttagtgctgtctgattaacctgagactattgcattagaccacccacagctcagaggtgtactagtttctctagctattcaactctctgcttttcctcacaagaactttctgcctaaaatgactcacttctcttccccaactctatcctttgccttgcctgagccagccttttttttaaaaacaatatagtaagttttttttgtttctttttttgtttgtttgtttgtttgttttttcccaagagggctactgttcctaaagtttccactgcttgttttcggttttttaaggaatttttttaaataattattttgattatgtatataatgtatgtctgtctgtggggggggtatatgcaaatgaatgtaggtagttacagagtttggaacagaacactgaactttctcaagctagagttagagagttgtgagccacctgatgtgggtactgggaaccaaccttgtgtcccctgcaagaacagtatgtgatctgaactgctgagccgtctctccagcctcagctgtattctggccacatcatcatgaattttagatttgttaaattacattttaatggtctgtgtcttctgcattcatctctctcctgctctctgcctaggtacatactctctggatgacctcattaaggctttaagggtaaagacaatgccttagcaacagaaaatattatttaattcattcagtgttggtggtcagtgtgtccacatgattatccacactgtttaatgttttgtgtgtgcttctctttttgctttggggaaggtatatgttggaagttctactacggtagatgaaaggtctaaccaaaacataattattctggaaagttccttctaagggattttttaaatcaattttttctcattgagttcttatgtagttttgggtgatttcttttcacatactatactacttgacatagcctcagtgatctaattaagggttatgattctgttgtctacagtcccttaaataaataatttaatgacggaacatctaatattccatgctagctacactctgatcaagacatcctctgactgaatctgttggatattctcaactcagtttgcttccaacaaagatgagtttcccagcatatgttatttatcatctttaccacacccgctatttagaatatttttcttttatcactattaaaaacaaatcttatcaatatttcatgacttcctaaatatcttctgtttcagatacccatttctaggacttctgcctaaatctattttttcatttttcaagagctcttcatttatcttgtaggatttataaagcctctcccatgtcttacattgtctttgtgcttttaatgtaaattctcagagtttcctgtctttccagctgaaaactgaagataaaagtctgtactgtgagcttgcaagttgactcagagggtaaaggtacttccatcatgcctaaggacctacgaacaatccccctcccagaacccacatggtggaaggagagaacacccacaaggttttcctctgacctccacacatgcttatatgtgtgtatgtgtacacacacacacacacacacacacacacacacacacacacacacacttgcacatatacatgcattaagaaaatgttgtagtttttaaaaatcacatatatgttttaaattctgcaatatctgtataactttattgtaaacatcaaaacccaattcaaactagttcaactggtgaaggaactgtgttgctgaattaacagtgaagcatctcatggattcaagggtcatggaatctcatggttccatgttcctctcaaagtaaggaccaccaagaaacaagtagaatcctttctacctgttaaagaaaagggacatgaaaggcttatctctatggatttggagaatggacattcttagagaattgtaataatgatctaaactatataatttttctggggtttggcctgtatcagtcccatgctacagaagccatctattccagactgatgtctttggggctgcaatcagagccagccaaacagccgcaggtccatccctgagtgggagagtgtggactgtgaaagtcctaggtacccaaaggcgataaagacaagacagaggcacattgtcatctcaggagggttctcagtacatgctggagactggatccacagtttattcaagcatcctcttaaatagctttccaacagtgggagtgattgcaaaagacacctattaacatgtataaagttggtatcaagtatttcctttaatctagaggcacctctaaaacttacatcctcaccagcctctcactagtctctaggcacatatacaagccctcagaataggtgtgggcccacccacggcctaggtctgttgttatgcaaactaggagacattctctacagaggccaagccatcaggtggtaaccagccaatttctaaaagacacctgggatagagtttgaggcctgcatctgaaataccatagttgatattttcaggcctgtacaataattattatgactgttgagaagatgaagtttagaaatttgtgatgcaagaatcataatgcctgttacctagagacacactgcaaggattttaacctctagtcttgcactcatcaacttggatggtccattttacctgttgctttatcttccaaactgggagactctaatagcaaccaaatcatagagtagctttgataactaaacaccataatatgtaaattcctattacagaaagtggaaacatgacactctcttgatctcagttatttttcatggttgccaatacatcattagcataaataaagattgtttgggttatctttctttttttattttttattctctattaaattacaccctgaccgaagtttcccctccctcctctctgcccagtccctcccctctcacccactcctcttccatctcccttcaggaaaggggagccctccaaaggatatcatggcatatccagttacaataagaccgggcatctcccctcatataaaggctaggcaaggcaacccagtaggagtaggaggaaagggttctcaaatgcaggcaatattcagaggcagcccctgcccccccccacctccccaccccagttaggagccccacaagaacatcaaactacacaaccataaaatgacatattggtgggcccaggtcagaggcacacaggctccctgatagttggttcagtctctctgagcctctatgaaccctgcttagttgattctgtgggccatgttcttgtggtgttcttgacccctctggctcctatgatcctcctccctctcttcagcaggattcccagagctctaagctctgcctgaagtttggctcgaatcagctgctggatgaagcctctctgatgattgtgttagactccgatctacaagtatagcacagtgtcattaggaatcatttcatttacttttttctagtcagttgttgttctagcctaggtctctgggtgtttttattaagctataaatttatggaaagtaaaggctctgccttgtatggcaccatatctactacagtgcttcccgtgggttcttttacacttagacacagttaatgggcagttagatgggtatatcaaaaaataaaagaatgaaggaaaagaagatggcacaatggttgggacaaaaaaaatataacccttcaaatgcattcttgagttaagagagcaggtttggctgttttggtcataaaaagaaaagagccaacattctctggggctgacagaggaagataatacctatatcagatagactgaaacaactggctgttcttcactatatactagacagctgtggctgttggatagtgatatgaggtttcccaagtttctgtagagcaaagcagacaactgatggccgcaaggcttctgtctcatccacacaaaactagatcactagaacctaataaaattttgaaaagttttcccaaagcattgtttacttagaaagttatttcttgtgtaatctaaaagtctgtgaaatagtatggcattttaacatagctctaactgaatttattgaacatttccttctgagtcactgaagatgtagttcatttgcaacagttattgttgagtcactaagcaattagaggcagagtagactcagtttctgttactgctaagaaaacattaattaagcatttggattgattagatcatctgcccttgggatgtagaaacataaaaatcacaagactggagggagtcgatgaggagtattttgcttgtgcgacagtgggcttacgatcagataaaagtgacttcaaatcgatgctgtcatacaacgcaggaagaaggactcaagccagatgtggcctgtagattagcatgtttgggtcactgactcaggtagagagagtcgcataattgtggtttcagcacagtctgtgtaaggtacatgaacacttgacagagataaatttggattaaactccatgtgtgctgctttttagctatatgactttagatgacaccatgaaactctcagagcttcacttttgtcattggcctggggacaggcccagccaagagtcaaatatgacaagtggcctatggtaaacatatcagatacagactatattatatttatattttcatttttattttacttatttttatattctctgaatacccttttaaaatataaaaactctcattacttgaaatttttcataaaagaaaattgcttactggctttttttacttactggcttactgttgtttacccccaacaacaggactaaaataattaaatttattttaatcaatataattttaataaatttatttgttttatgagacagggttttgttatagagccctggcttgtctgatacttgcctatgtagttcaggatggccttgaactcatgttaagaagaatttcatttttaggcagcaaatacctggcacgaaaaagtgtcccttaattgttgcttctcccatataacaataaagttgaactttgggtcaacttcaattgtaccacacctggtttgagtaccatgtgtacttcataatggccagcaggagtaccagctctaaattcaagtccacagttcatggctcttcccagtactcacaatgcagtaggtgttcagttccatgttatttattgcacagtgagggacatgctcagggtactagtgccttagcattcttagaacaatagccaggaaaggaacagagtaagtgcaatgtgcagcagatacacatccattctacaggaccaacaacagaaatcaactgtggcatatatcagtccagtctgccatgcaacctggatctaatggaaatgaataatgagaactttggtgatcaagaaagaaagattgcgtggggttactaaagccaccagtcactccagatagtcacctacagccagctaggaaggatttgatggtttttccttgtagttctctatagggtttagcaaaagaaagcaaaatagggaatgcattgacactatttctcctgttagtcctgtgtcttcactttttcttccagagattagatttaagtttaactgtgaggtaaggaattggctgaggtttccgacattcatataatcaagcctacacccatttataccttctgctgtcccaactttacaggccccattgttagccttccctacttcctctccagctccagctctcaggaatcattcggtaaattcactatagataaaattttctaataccttttcaaagatattgtgttgaaatgaccgcctcactttctctgtatagtaagtttcacacacacaaatagcagccctgttaggacattgtgtgttatttgttgtccctctgttcatgacacacttgggtcactctgcaatacaactattaataatgtctcttagctactggactgtgaacgctgggaaatctatttattttgtgacttacctttatatatctagcaccaaggactagtttctcagtctcttcattcagaaactttatttatagtggccaggcgaaacacatgatgtctggtgaactcagataatcagtgattcatttttattataagtatattattacttgtcccatacttatactaagaaattctcatttgtataagattcaaattaaattgaatgtgttttgcttttattggttaaatctgagacctaactttattacaggaatgggtggaataccaaggatttttttctgtgttacaggaaaaaagttatttttattaatttctatagatttgaatttcatattaagccacaatggaaaattcctacaatgtgattttaattcttgcttattctatgaaagtatatttttgtattaacaaaaaaggaattgattcaatatgaaaaaataagtgttaatccttgagaaactttccagattaataaaagagacattggcaagacaattatgatgtgtaacacaaataagactgactattgtgtttggacatgctatgataacaatggagtattaatcctaactaatattttttgagtccttcactatgttagagattgggtctaggttccttttatgtacttactcaactgttcttcatatattgcccttctaaaggctattgtcttcccattttgtaaacaaaagcatagacaagaaaagaacttaagatctgactacagatgacattgctaatcaatggtatttctatatttgaacctgaatgagtaccacttactaccgtgtcttagtctcttagtgaaaagaattgggattactatcagtgggcaatgcatcttatgtaattaaattaataatataatatcacaatgataaatgaataaatgatgataattatgagtaaaaagtctgttgctcaatttctagtggaaatagcaacaatataaccataaaccacttctaaatataacttaattattgtaaacatacttgagtatctttcaaatgtctacatatatttgtatataattgtcatctaacctcttaagagatccagaatagcactatcacagttgcttagggtgttaaaaagaagatgcccttgctgaaaaatgccttccttagtgtgtcatctagttcctatgattgctgccaacaaaaagagggcagaggaaaaccctgtaagtgacactgaaggatattatgtcaagtctcttacttgttgtagctgccagtctggtgtctatgtgtgatcaagccacagtgacataaaagagctctgtctctgatagttgcaagtgatctgagtatgaaggttgaagaggtagccctgtgacggataggtgctgataagtatagtcctaacactaaaagccttgggcagctgggaaagatctcagaagccttttcactcagaagttacttctaggcaatcgaaatggctggcttcctacaaatgctttctgccattgtagaggatcccagttaggtttgttcccagcactcacatctgtggttcacagccacagttgtccagagtgcacactgctgttgtagaggaccagatcccagtacttacatcaggtagctcacaactgcattcactccagcttcaagagacccaacacccccttctggactccacagaaacctgtgttcatatcttttcctaaatttttaagtgggtgctctccattatgtgttttaaaaacgaatttataaacatgtttaacataccgaacaaattatctttaggatagttagaaaattaagctgataatattttaggaccatttccatgtacacatatctcagtgaatagcattcaatattttaagatcactcccctgctttatatctatgtaacaagtgctggagagatgtgtaaatctgttataacaaaattcttttttatttaaattagaaagaagcttgttttacaagtcactcccagtttcctcttcctcccctcctcccctgaaccccaccaaacctcatcccatcttcattctgctccccagggagggtgaggccttccatgggaatcttcaaagtctgatatatcatttggagcagggcctaggccctccccccatgtgtctaggctgagagggtatccctctatgtggaatgggctcccagagtccatttgtatactagggataaatactgatccactaccagaggtcccatagattgcccagacctcctaactgacaccatgttcagggggcctgggtcagtcctatgctagtttccaacctatcagtctggggtccaagagcttctccttgttcaggtcagctatttctgtgggtttctccagcctggtcttgacctctttgcttgtcactcctccctctctgcaactagatttcaggagtttggctcagtgtttagctgtgcgtgtctgcttctgcttccatcagctactggatgaaggctctaggatggcatataaggtagtcatcaatctcattatcagggaagggcatttgaggtagcctatccactattgcttagattgttagtggggggtcatccttgtagatctctgaacatttccctagtgccagatttctctttaaacctatagtggctccctctattatggtatctcttttcttgctcccctgtattcttcccctgactcaatcttcctgctccctcatgtcctcctctcccctcctcttctccccttctctttctcccaactccttcacccctccctccatgctcccaattagctcaggagatcttgtccctttccccttctcctggggaccatgtatgtctctctcagggttctccttgtttcctagcttctcaggtggtatggattgtagcttggtaatcctttgctctatgtctaaaatcctcaaaattcttgatagaggttgatacgttaaataagtcaaatcttttttggagtttaattttatgtagtgatttggcacatggaactttcacttaaattgggcattcatttctgttatttatcaattcacttgcttctgtttgtctttgattcaaagttaatcttcagtttggctaaaattattctgtattagatgaactgaattataaagtcacttaaaatttttgtttagagagttagtgttttacccaattaagtcaaaataagtgatatttgaggaacatttactaaaaaagattatttttatgttaactttattttaaactgttagatattactttctcataagagaggactatttaattcccagtctgggaattttaattctctgtctgacaatgagactctatcatctgaagtgtgtatattttctttctatataaggcatatttcagccaatgatataacattagtatgcaaatttatgtagcacatagatgccatattatgtagcttaatattcggatgataggttataattataagcttttaatctctttctagtaaaaaactattcttggacacaggatgaatcatcctctgaggagcattgaaaactatgatatttaggactttggaaactttcctgttaaacactaattaattatggaagagtgcagtgcaatgatcccgactccacatgtggaaattgaaatgaaaaacaaggtgtccatattgatgatgagacaagacataggaggccacacttttttcctacctacaagaaagcatgactcctacagtgaagatgtgttttttaggtgatactgtcctaatatgtgacttacaatttagcactcacctcagatatggatatacaaataaacatttaaaagatagtttggcaacatatctacttagcaaaccagacaaagaagattcaactcagttcccacgacaaccctataaccaggtacacatttccaggcattaactcccatgaagctagtctctgagccaatcagaaatgggttggctaacatggaaggggaaattccatggagccccagccctagacaaaaaactacaagcaactaaggaagctgagagcaggagaaaagtcactggggaagagccccagttactcaatgctaagtggtcaaactcaataggttacatttatgtatttaggaatataagcacaattaaagaaaagtaaaccaggaatctgaggaattgcaaggaggaaacattggatgggttggatggaggacagggaagggggcagatgatatcttttaatttcacaacaaaaacaagaataaaattgttattgtcttaacaatcagccactgtcagtcacttcaataaccccttgtctggctagttggtattgtagcatgtagagtctaaagttgtagaatagtattgttgacttttatcccctacctgcctggatagcaatgtctgacatagcaaaagctaacaagcttcccacatggtttttctgtattcagcaacaaaagtgtgtggtgtctttagcaatttgttcttaccattctgttggtcttaacatcaacaatgttaataacatgcatagttttggaagacttctggagactttctggccaataccttctcaagagatatcccatacctaggattttcacttaataataactcctgtcttctgggaatggaattatccactcatgcatgatatttgataattctaacactatctataagggaatggggagtgaatcatctgaaatggccatagagaagtaacaaaagccatcaatcatgtcttagtattcaggagaatgaaatcattcagctatagattatgaaagaaatatgggttagtggtgaatcttagttcaggtaagattatgtcgggagtacaacagaaaagaaatagtaataaatatccattcttttccttgctctcactaactctatgtattaagatgaaccatatgtacttactactattcagccatttttaaaatgcaaaaagtaatttcatgtcattcaattcaataaacatatgtgttcattttcgttgaagtaaaccatacaatgtgaagttctatgtcgaaaatatcattacgctatcaacctagaaaaagtaatatgtaaagggatgtgaaaattgaattcttctgatttcatggctctcttgcatttactgtacccttccatggatatagttccaaatgatatgcattgtctcagaaagtgacctaacataatgaatggatgcatctacacatgtaaccaaggaaaagaaactttggagttaactaatggaacacagtttttctagctgtataaatttttatatttattgacataatcattatagatatttatagggtataatgagatgcttccgcaaacacgtgttataaaattatcaagccaaagtaattatctccttaaatatttattatgcatttgttgtaaaaattatccaaatgttctctttcagctatttgaaattcatattatagttagctatagataccctaatatgtgaaggagtaccagaatttattcttcctgtttaatggaacatttttttctgatcatcagtctctccctaatacctcctattattttcccagtgtcttagttactgttctattgccgtgaagagacaccatgatcaaggaaaatcttgtaaaagagagaatttaactaggggcttgcttacagtttcagagagttagtccacatcatcatggcaggaatatggtggtaggcatgccagcttggggctgagagcttacatcctaatcgaccgtcagtcagaaagacagactctggttctggtaggatcttttgaaacctcaaaaccctcctctaaggacacacctcctccaacatgtccacacctcctaatccttccaaaaccgttctactaaagggagaccaagcattcaaacatatgaacctaggaaagccattcttattcaaactaccagatcctgcctctggtaactacaattccactcttaaatttcatgggattaactttcttaggttctatgtatgagagatatcataaggtatttggcctttttctgtgtctggcatttttagagcaacacaatcttgtaaatttatccactttgtcacaaataccataattcacctttatggttcaataatattccattgtgtatagatataccacattttattaatccatgcttccataccttgactactgtaactaagagcagatttgcaaaagtaaaacacaacggagaaagagatagagaccctgcatacggcacagggaagttgtttatctgggcatctcaagtagtgtttttctcttctacacaaagtctactgtgtttctaaatgaatcatggggaaagcctctgcagtagcattccctcatgatttaacagctaaaaataaaaacaaccctctgccaagtccacattctaaggcagatcgacctcagtgtaaagcccttagtattagacatgtgaagaatctagtaaatgttatacatataagcccatataaatggtgtgtgtgagcacttgagtgcgcatgagcatgtgtgtgtgtgtgtgtgtgtgtgtgtgtgtgtgtgtgtgtgtgtgtgtgtgtgcacacgcacgcacacagcatgcatgcacgaatgtgtgcttgtatgactaacacagggtttcagacttcaaacgctttatgttcttccctcagcctcttgagtgctgagattgcaagtgtacactaccatgcctagctagatctaccattctggatgtgttgtaggcaggttagcatattaagttataaaagcagatcgttattagggtatttagtcccttttttaaatcagaatttgattccttaaactaaacatctctctgtattttatgaataaaagttactttcttaagaatataaaatttgtcttagttcacctctaagacctacgtgctatccactgtggaatcagcctggaataattattttagtaattttaaggtgtatttttatatactaatttacttttcttggaatgattgatgggatgctgaatcaggttatatttacaatttttgaagaactatgcacacctgctttgcataatggcatactagtgtgcatttctaacaactgtgtatgaagtcctctttataccatcttaagccatatttctgtacttttcttcctaacagtagccagtctaaattcgatgagacatttgccaggttctagttttcttttccttgatgagtagtgacaatgttttttttttttcattgttaggtatttccattttaaaaaacaatccattttggtcttttgaccatttttcaagttaattatttggaaactttggccattggcttttctggagttccttctagttccagacatcagccgcttgtcagatgtacagaatgcagatatccccctggttattatgttacctctacatactgatgactgttttctttgatgtctgaggctttttgtttatttttttgttcatgcttttgagatcacatctaaaaatgtactgctcatattaatatcaaatagtacttctgctatattttcttttaattgtttcaaagtttacggttatacatttagtctttaatcaacttttaattgatttttgtatgtggtgagagaaaggaatcatagttcttatgcatgtgaatatccaattccctagcatcatttatggaagagactattctttctccaaactgtggtttgtgaccaaacctttgttgataaaatgtgttaactaaagctcattggttattctgtgtcaaacatgattttaaggtctatcatttctttattcactgattaattctacatgcagtatattagttttattagaattggggtattaatcattttggaatagttttgtagttgaattagaagtggaaatgagagtgatctgattcagaaaacaaaacaaaacaatcacaaagctgcttaggggtcctgttttcaaacagcagtcagcttcatcacaaactacacaatttcctgtaaataatgcacagcaataatactgtcaattccatttatgtgcttcttggatgcttattgtatcctatacattttgattatctttacttgtttctttttgaattttactataaaaaggatttgcttcatcctgtgcgaatgtcatttaactggaacattaaactgttgcacacaacagagaatgaagggctaagcctgtgtattgctgtaagctcataggcaattggaggagtgtcagttttcatgaaggctggcactaggggagtgctaggactctgctaacagcagtcatgctgcctcagggctgaaaagggagatccctactctggcagctgtctctcctctcccccccccccccccgccatgaactctgctctaccttggcttactacctctgtgcttgttcccttgagacatccatgcaccataaagttctatagtagccacgattacaggataattgcttcagaagaagaggaatccatgtaaagccttgttatggattattcagacactgacagtaactctactttgggatacagcgatgatgaagattccagtgatgaagttcacagaacatcagagtctgtatttgtagatatctggggatatttcaaagttctgtaatttcaccagaagagtttctaactcttcacaaaatgttttaaaagagattactactaaaccatgaagctttgcttttacttttataaatcgataatgtgcttgtgaaaatacttgataattggccaagcagtagctagttttgcaatggtccattttctatcactactattattagtaatgcttaaatcagctaacctgcaggaacagaactgtgtgaatgttagattttgcttttaaaaggctgttgtgtctggattgataagtatataacaagttttatttaatacaaagtagaaagattcacgtgctgagcaattagaacagtgtgtatttagtgtgggcattgccttacaattataggtgtataatattctcatgtataatctcaaaaaacttaggatctactaaatacacaccaaagagtaaaaatgaaagaaatcaagttaatttaaaaaatgtctccttccatgtttttctttttctccatgtctacaccagtagtaaatacaacatttctaggttggtcaatattctctataaaaatataacaaccatgaatgtctaaaatgcctagtgacaacataaagtcattagggtcctcctctattatatgtacttggatcattaaaccaaaatccagattgcatttatttttaccatggtccttggaccaacaacagaaacaaatatacacaataaccacagcattggcagtttcttcctgtgctaccctttcattagaagcatgtctgccaaagtggaagattaacacacactaaagccaaatcaggcagtattctgttcctcaaacaagcagggtctctgagcatttccggacccatgaatagaggggcagcattacctgaatagtaggaacaatggaaatgtagtggcagcatgacttagagtcaaatgaacttgacattaaataactgccgagtattacatgacagtattattaacctgcatagcaggttaggacatatccataaattaaaattctaataatttaagagttaaatgactatcagattgattttgtggttagacatcaaaatactttggcgctggctttattaacaaatgtaattttatgttagatattatgaggactgctcaaaagttattctgtgttttaatacatgtataattattataaaatttattctgacaaagtatatgagcagtgttgattttcagaaagaatttgattcagaaaacagtcaataaactgtgttcaacttcaagagctgggtcttactgtggatagtttatgtagcttgtattctcatgtgttcatctgagacaaaataactgccatttgctatgttcaataaatggtatttgtatgaatgccttttatgcaatgcttaacatattcttgtgtttaatatgcaaccttactagcttggttatttaaaaatataatagatgtggatggctaaaatgcctagtaacaacataaagtcactagcatctccccctttttacacattgcaacattaataactaaatccagattatatctgtaaatacaacataaaatattttattgaacttcttagtagtcttgatatttttttcagtctacataaaaattcttctgcttcaggaaaacattgtatttaacgttaaaattttgtctaatttagataatataataaaatcttaaactattgcctatttatgattaattgattaacttatatccacaaaatatattcaaaatcaaatactgttgtttatattattttaaaaattcttaatagtcaagatagaaatatttctaaataggcaatttccatttttttctccaatttttgtggaaggtagcagagatcaaaggatctcactgtgtagtatatatagcccaggatggccttgacccatgatgctcctccaagtgcttagaaactagttacaggtttgcaccagtgcagacggtctaaataggcaacattataaataataaatgtgaaggtagatatggaagagtaggttttaaatgatatttttataaagtcatggtagcattgttttaagaaaccatttgtcggctgggcattgatggcgcagtcctttaatcccagcactcgggaggcagaggcaggcggatccctgtgagttcgaggccaggctgatctccagagcgagtgccaggataggctccaaagctacacagagaaaccctgtcttgaaaaaacaaaacaaaacaaaaaaagaagccatttgtactaccttatgatgctataaacacatggtgaaaataagttattcacaagctatgaaacctgtgtgaatgatgtgcttctgctggctgtgtttacttcacacacaaaaatcacctctatagaaaatggcagtgtataatgaaaatatatcatctgcacttctcactttgttactgggtaagagtaacactgaatggcttcttttcattcttatgctcaggtaggaaaactgaggtttacatagtttatgatctgtaaatcttggattaacagcaagttcctgtgactctgaagtctgaacgtagggctggataaatggattagcagtcaagaccatatctagtcttgcagaagtccccagttccattccctaacatccattggtggtttaaagctgcctgaaactttgacctttgaggtcactgcatttctgtacactgatcatgatgatgatgatgatgataatgatgataatgatgatgatgatgttatctgagctctagcacctccaggttcaggaatgcaatacccatgcccttctcatagcacacactaagaaactcctatattgggcattaagaattaaatagggagcaaatctagccatcatcccttggctttatatggtttagcagaagagagattgagtcacttggtttttatagccacataaataaatgtatgagttttaagtagtgatagccacttccatgtggagatatgtaaggtaatgagagcagatacacagggaagcccactagctaattcaggatggcatgccttaggaaagggcactgggaataggatccaaaggacaaacaagggtggaaaaggcatccagttggagagaagttcttaaacctgagaacagcgtgttatgaagactgcacaggagagagaatatgtttgccaattttgaaaggaggccatgttctttggaagacaaagaatgtgaagtaggcataagaggcacacactggcagctcctgaaactataataaaattttacagtcagaggaaaactttgtgttgtgggtagatttaaaaatcttttcctggggtagaagaaccagggggaggttggatctggggaagaggggaggtgggggagagattgggaggaggggagagagggaaagctgcagtcaggatgtattatatgagagaaaaataaatcaaaataaaacttaaaatttaaaatacacaataacaaagagctttcttctgtaaagtacaacacattaatgaaaaaggtgtgtaagagaatactattctgcagcacctgaaagcactgttcatgaaatgtcatggacgcagaaacctgtagaatctcattcgaaaacataaaagtggaccacagtaatgaaaaggcatgccatagtcttgtttggaaaaattagtatcagaaacagttgctcctaagatcagtgtattaattcaatatgtatttacaagaatcctaatgtgggtttctttaaaggaagaaaaatgattttcaggtcagtatcaaataatgaatgctgtaaaatatcacaagggtatttctggaaatgttagaaaaagaatacttgtttttgattttccaaataccaaatgctgcttctgttaagcagctgtaacccaaacaagatgatatagcaacaatgaaagaaataatggaagacatgtcaattcggaaaattacagaatctagagtatgtatcagaacttttgtgtgtcttcaatagtaaaaagatcctttgggaacatttttattttcaatattttagatgcccagtttgggtagaacattgtattttgtgatctgaaaacctatcaacacagtattttcctatgcaattgcaattgcaattacctctgtgttcaagcatattttccattaattattttggtttagaaatgttattataggaaaaaaggtgcactgtcaggtgtaatttaatgttatgacaatgataatactgagtttatggtagctgaaaatgacttgtgaacttaatttaccagatccatctttcatgattagaggtacgtggggaagattttcaaaggtctcagaggcagacatcactttctatagttaaaaattacatgtttttgaagagatagtctttatatatttaagtcactgtgagtaatatttgttataatatttatatatttacatcactgtgagtaatatcaaatacttgaagtaccatgagctctgggacagatggataactatataccattaagtccccaaacctaagttgcattaagcagtgttactatactaagaaaatatttaaaactggtcctttgatctcagagttacaatgtcaaattgataacagttgaattaaacactctttttccacgggtatgtctttagactctttaaaagctttaatctattcattcccatttgtatcatcatgtgattaatttagaaatccccccaaagagcaaagacattggtcttataaaatattcttccacttgtgtaagtgaaactttaagtttgataattgtaacaactgtgttataactgcagggaatgtgtgatttataatgtgtataaagtggttctttgcatgaagccttaacctggaagtgcataattcaaaaaagtgtatagactgtgttttctggatgtgttgctatagtcatttgcttttggccttaaaggctgtccatcctaacgtgtctattttttatgcagggaggatgtgagaacagcaaacgtaattgccgcagaggctgtcacatgccttgtgattgacagagagtaagtacattgctttttctatgcatagcacatactcatatcagccatatacatgtttctggaattagtcatcattttttagaggtttagtacttgtttaaagtcttttcctttccagatgagatctatattttattctcgtattatttttagaagtggctagctctgccaatctagccttgtaatctttaataagatacttaaccactctgaacttcagctccacaggctcacttgaaaagtgaagataaagcaatatcataggatattttgaggattagtaagaacgtgtaattaaagcatttgcagagttcctttaactcgggaggtgcttagctagtgcaggctattttggtgtcctatttagaaacatcattgttattgctttgagtatgtttaaggtttcttttctgtttctctattctgagactcctacaccagaagcttcacggaagacactcctctaaaaagcatcagctttggaagtggacaagagcctatttagagaagtgaatgtctgtctcacgacatccatcactgtcttgtttcttcacttcattatagtttacagttcttactgagatgataagtaaccagaagtaacttattgccacttaaatatggctcatatgcatgttagccacatggaaccaggtttctctcaatgcagtgtgtgtgaatgagtttctcagaaaggctaagagcctgccccagaaagagtagataggaaaccattttggtagaccctcccatctgcttgaggcattgtgctgccatgaactacagctgaggaacatagggcaaagttaggaagctagaactgggtgagcttaggggactctgagtggagaggttccttatttgataaacaattcctatttttgaggtctcttcatgctggatcaagagaagctgctaccaggtggctgaatccacagggagctctgaaatggttgccattgtggggccatttataggaggaaggtgtaataaggaatcagattgaaaaggataaaaacaaagggttgaatatctaactaaattaaagaccaagaaataagataaggatattgttagggcagagaaagttagatgtagaagcagaatcagttcaggaggcatgatgatgttcccttgagaatgaaatccacgcgtgggtatgcaatcttggatacttaagacagatgtttttcaggaagccatagatgtggacaggagctccttctaccactaccttaaagttaacactaacattgcctacatagacttaacagctgaagtcattagatagggtaaaattccatgaaagaaaataaagctaaaataaagctaaatagatcagaatttgttaaaactcagttaagttcagacaagggaagaaaaagagatgaaagagaagccaagaccataggagacagtgcagtttagaaaaagaacatctcaagaaacgagagaaattaaatcctaagctagagaaatagacaattaatgaaatatcagttcacaaccaagagttttctaacaaaactggatgagatcaagatactaaattacaactagacatagcaagaagtgtgaaaactattgcccagtgtagtaattgcacataattatgtacacctcaaaaagctagaagaaaggccttttagtgcattccccacagacaagtaggaaacatttaagaagatgaatatacttaactgatttaaacattatacaatatatgcaagaattaaaacatcatgttgccctattaatacacacacaatttgtatggtttagtatacaaattaaaatgaatgtaaaaattaaagaaagtgtgaataatgttaagtgttagagagagttcagataaatgatctcatatcgttgataggaatacagattagtgtaaccataataaactaccatttgattcactaatactgttcctggatactagagagactgaaaatcagtatttcaaagggttgtgatctctttgcaagcattgaagaattagctataatatgccaaaatattaaaacagtccaagtgcccattggtggatgaatgagtaaagaatatacagtacatattaatgtatatataaagaatatacagtaaatatcacccagccttaaggggtaaagtcctgccatttataacaacatgggtgaatctggaagactgctatatgaaattggtcatgcaaagaaagataaataacacctgatctcaatcatggatgtcagaaggaaagggcaaacgatggctatgagaagttggtggagagagaagggaagaataggaggttgttgatcagagactataaaattaaataggctgaataggccttaaaatgagttgcaccttagagcaactattggaaatgttgttgtcgtcgtcactttgattttgagacacacctcactgtgaagctctcattggcctagaacccagtgtatggaccaggtggctcaaactcaaggagatcttcttgagtttgcctcctgagaccttggattaaagttatgcacttagaaaaacagttagatggaaggctaaggcaggcagatacgagtttgagtccagcatgctacagagtaagtttgaaacaaacttgggctacatatatagaacctgtatccaaaaaatacataaatgaacaacagtgacaataaacttgaggcgtattataaaaaagagaggagagaatgtgtttacatttactgctttggtttagtctccctgcattgcacacacatttcaagacatctccttgtacccattaatagatgctattataatttatcaataaaattagtatttaaaatacacatggaacctggcattgtgacccatgcctataataccacttaggaggctgaagcacaaggactgccatggactataggccagcctgggtccacagtgaattctaggtcatcctggactacactgcaactctgtctcaaaaaaaggagaatttccaaaataaaataaatataaaacttcagttgtttaaatacaggaagagaaagaatgagggatggtgaggcttatcctagttttaaaaccttctgatggtaagtttgagcagatatccagagagggggcagaattgagatgctgaaggaaaagctggttatgctgagtctggggactgtaggcatgtgaaggaagactgtttcagattcacatcctccttgtgttttcattcttaaaaagcagcttttgaaggtagtcaaaatataaaaaagatggttaagagatctgtgaagaaatgttgcattttgactatgaaaagttatggaaatgtattgtcatattgtctctaaagcataaaatagagaaactgacatagaaagatgagagcagatcggagtgtggcaacctagcagggactgctgggtgatcacagcactttataccctgcagtcctttacacatcatacgttttcatatctgtgagaggtaggtagcatgctttacagatgatgaagcagacgcccaccgaggttgataacctgtcagttctaaagtaactagaacccatattaacttaaccttgggcatgaaaactggacaggactttgaggataattgtcatttagtcttgctccatcccttctgccctttgatgttgtaagagccaaagaaacatcaaatagcattgcacatacatgttcttcctcgtccttctcttttcctatccctaggcttatccactgtgcagtagagatggataggtattgacaacagagctcaacacttgaatactgtccagatcatgttatgagaatatgcaaaactactcaaactcttaaacatcacattccttttcaatgagacaaggggataatattacctatataatgaaattggcctgaaagcaaatagtttatcatgtgtaaaggagcatgcatagcagaacatgtgtgataagctccatgtaaaaataaatgtgtccttcctcttcttaagtaggacatggggacccttgagacatttttcattctcctctttaagtagaaaatcatataggagaggtccagttttacacataaatacaaaaatagacaaattgagtatttgaatatagggacttataacttttaggggagatcttgagcatccaagaaagcattaaatccatagctgaggtgggggcacagaaagagacagagacgagagacagagacacagagagaactaactgcaatggagggatcttgtcaaaactgctgctggaacctaatttatgtccaattagaggagcaccggggcatcattctgtgcaaacagatggcagacattagggctgtcagcaaaaggagctcccttcactaatttacaagctaggtaccacatgccataagccagcggttacactttcctagggggaagcaaaagaacaccattgtaagcaatcatgaatgtcaggcttttgctttaaagaaatgctccttgtcaaatcagaaagtgacgagatggttgttccctccaacagcattccctgaagattttcttcatcatatatctgtttcattatctttgctcccataaatactggtccccctgattcctgtctttccagctttgacatcatatctgatgtccccacatccttcttccctttgctctgaaggcatcatatctctttgctgttcccaaaacacaacacacacacacacacacacacacacacacacacacacacacacacctgtttttcatttctgcatggcttaattccattctttcattttctcatccttttctttaatctttgaattaattttggtaagggctaatgaaggattaagatatttctgtgcaagggctgtcggtttttgatgacatgccccctaaagactaaaaagtgagtgagaaactggaaaactgtttcaggttttcaggaaccttcagagaatggagggcagattggaaaggaaactcttagagacaatggttcatacacacacactattctaaccacaccaatcagttcagtttcctggggggggttatgtaccaatggtaatatgtccacctaggtcacctgtgtcttctttatagaccatgccattctgtccacatgattggatgactgaaactccatatgccacatcacctgtggctgtattactgtgtatttgtgtttgtgtgtgtgtgtatgtctatattactcagctgagagggtgataaacttaaaatatttcatagtgtttgcatttcttacaacctaggtaatttttattttggttcattttcagaaagaaagttggggtgatgtgaggatattggcaggatgattacaagaaaacaaatgtgccttgttagaatgctgtctgctatcatcatttggcctggtcttttttcctctctctcttattgactattatgcttttcaaagacacgtactaagtaagaaagataaaaatcccaaagtttaggaagacactggattagtttagcttaatgatgtgagttgaattacagcctgtccttaacaagtgtgatctaactacaaaacaagcacatttccataaaaagaaggctattccaggaataaatagtcaatgtagtttaaagtcacagaaagaagatggagggacagctcttcatgatgcttgcttttcttaatgccttaaactggtcacagaccttgcacttttgctgttcctcccatcattgacaatcagcttctctggctaggatgtgaattgagttccatactcagcttagtagctgggccagagttcactgcttacttgtcctgcattagccatccttggccatatacttgccatttacaagacttcaaggtaaatatatgagtggtttctagctcttctctgttacacaaagaacagagtgcctctcggattctatagactctatgaagagtccacattattcatatcttgatgggaagtgacaaaactcagcacattcttatttacaaatcactgtttgaaaaaatcggcaggttttaatgggttgtccaataccaagaggtcagttatgagattatacacatacaagcagaattaaatgaatccgcaggggtgtgtgtgtgtgcgtgtgtgtgtgtgtgtgtgtgtgtgtgtgtgtgtgtgtgtgtgtgtgtgtgtgtaaaacaattaaagaaaaagaggccatggatttaaggagtaaggcagggcatgagaggacttggagggaagagagagaagggagaggatgatattgtatttattttaaaagtgcccttcccctataatgagattgatgactacctcatatgctatcctagagccttcatccagtagctgatggaaacagaagcagagacccacagctaagcactgagctgaatgcctagaatccagttgtagagagggaggagtgataggcaaaggggtcaagaccatgctggggaaaacccatagcaacagctgacctgaacaagggggagctcatggaccccagactgacagcttggaaaccagcataggagggaactaggtcccctgcacatgggtgtcagttaggagccctgggaagtctatgaggctcctggtaatgaaacagcatttatacctagtgtacaaatggacattgggagcccattccccatagaagtatactctctcagcctagacacacagcaggagggcctaggccctgcccccaaatgatatgacagactttgatgatccctcatagaaggcctcaccctttctatggagcagaagagggatgggatgggggttggggggggggggcgggggagaatgggagggagagggaactgggtttgatacataaaataagattgtttctaacttaaataaaaaagaaaaaataatgaaaagttcattgtttgcaattctcaatgaactaatatatatatttttaatatggtaaagaaagagaagataaaattttataagagattaggtgactcataaatagcccaaaagatgtttaaaaggagcgagaaggcatgcttgctctgtggagggcagacaatgacctcctcaggtttgtggggagtcatctttctcactaaagcttatttctaccatgtggctccaaagctgcccttttctaaccctttctcaagatgaactctgttttgcaggtgaggatacaagtccaggtgtaccactcagttcacactgtttaatcataacaattagtaagacagctggaaacgttacattgttacatttcagtatcttttgatagatcttagaattttaaaatagactttgtaaacccactcttacaaatcctctagttaagaaatgagagttgaagccaggtagtggtggtgggaacacctgtaatcccaacactcagaaggcaaaggtcgggggatctctgtgagttcgtagccaacctggtctacaaagtgagttccaggacagcctgtgcagctatacagagaaaccctgcatgaagaaaacaaaaaacgaaaaataccccaaaaggaacccccccaaaaaaaacagaaatgaggactgagtcacagaaggaaaatagatttctagctttctatttctggtctgaactatataccttatgacatctgatatgtcaatactgcctcccctctatgatataattcattggatgaccaagacaggaaactcatccaaacacttatgtaatggaaaaagcacatattgagccttcaatctgtgttaaattttagactcagtgttatgagttgatagatagatagatagatagatagatagatgtagatagatatgaaaacagacagctgccttcaaggatagttgcacttctgaatgaacagataagatcaaaacaaagaagaaacttatactgatattttataaacttagctgatgtatctggtgctaattctactactttttttaaaagaccaaatatcagtgaataaaatgcttcagtttcaaatgacattccatttggataagcaccaccaaaagtcagatcccaaccattctggttaaatagttggaattaattgattaatatgtcaggttcattaattcagttattttagttgactacatcaaaagcatgaaggcctttactgactcactttcatgagaaattgtcttgctattgttttttactgtgccatgttccttttacttgccatattatgaatttacattatctattttaacgtacattctacaattataagggaaggacagaatgtttttgaacagctatgccagggaaagtctactggctatcagatactatagagtacatgctagaggaattacaagcacacactaggatgaagaagcaaaatgcttcattcttgctttgtttctccagtgctgacagcatgtcaatactaatcagcatggggaaaatactgaaaatgtaagacacattttcaaaagccagttaaagggctaaaaaaaaaaatctaagcatgaggatgcatgcctgtaattccccatagttgagtagctaaggcagaagaatcattttgagttcaaagccagtctaactctacttataaaagtaatgtaaacaaaaataaaagatgagagaaaagagtcaaaaccaggacacattccaatccaaatcctgtcctgccacccagggacataaagatgaagacatgggcttctcctatctgatgttaacttgtgatcctaacaattcaaggatgaacaaatagtaagaactgggggcaggaggtgttttgcctgaagcttctcagggaacttcttggacgaagtgacttttgagcagctaggttgttttaagtatcagtaggagttttacaaataaaggagggcaaagtgaaggcaggtactccttagggcagggcttatacaagcacagactcaatgatttttgtgcaatactgagtggaatgtgctaagaacagaggacttacagaagaaactagaaaaaagatcacacagatagaagctgagagttgagtttgggaagaggaattgcaggcaacttatcaagaaatatcctaacaggagctagatagagggttcaacagttaaacgcactgctttttgatgaggaccagggttctaatcccagcacccacatggtgactcacaactgtctgtaactccagttccaggggattgacaccacctccttgtctccacaggaaccatgcattcatacacatgcatgcatgcatgcatgcatacatccatacatacaatgcatacataaatacacaggaaaagtagaaaaccaataaattcatattttttaaaagtaatctcctagtatctcaaactaaagtatctgttattatcctttggaaactaaggggccaatagagagctgttgttactgagttctgtatttgtctttgaatggagggaacagagaggaactagcaggggagactgttagggtaaagtcacaacaaccttaagggatgtctgttaaggttgagagttttagacttgagtttcaacatgagtctaaagcagatttgggtgatttgagaaaagtctttcttgtccaaagactcagtgaatacctagaggagttcagtgatgagcgagagaaatccagttgttatggaagggaatgattgcttcagctatgggcatgctaagttcgtatttattcagatgtcagaataaagtgatcatcaccagctagaaatgcctggattctcaaaagacaaatagaagttgacattggatttcacagcaaaatgtaatcacccttggtttaaataattattttgttccatgttaataataaataaccccatttttccagtcaatacttccaagtttactttttctgaggcttgcatttttgtccaatattttctagatttgtttgaaatctaaaatgctttgagacttatatactatttatatgaataaataatgaaataagccaaacaatacttttattttataaaatttaagcatgaaacagcaatccttaaaataaagtaacttttagaatatcacatttgccagtctgagcagtggttctagctgcatatttggggagggaaatctaatgtgtcttgtagtggagtgggtacaggggtgggcagaagccaggagcactttcagatagaagtctaacagtaaggctaaaaacaatgggaaaatgattaaagttgaaatctgtgccagatactcactgcatattttttggtagagttaagtagatttgcttattttagtggcacacttcccttgtgagacagtcattataggcccagctgggtcatcaagagctgaggctttccttttcttttcaatatgtctcacagttggtactcatctgaagcacacagtataggaacatgaatggaattagcctcaggcacaataatagggatgcctcatccctgatcaagagttacaatagcagccctttcagaacttatctctccggatgaaacacaatggtcaccttatctacaagctcttctacagacatgtaattaaattaattttgaatagataccagactatcaaaggcaaatcatgatttggtggttgataaggaaggagctgtcttgctagctgaattggagagagataatacattatcattgagaaagaaacctgagtgtcagcagttaatgagtcctatttctctgttttcaaaagatgtctctctctcttttacacctgtaatatattctatgctatatagttacgtatgtgataacagccaaaaaagaaggaattcatgaaagcataaatatcttgtcatttaatagtaactattgttaaagtcaatcaacttttagtatatttagctaaataggtcattccgcctagatttttttttctgctttatccacacccagtaataacaatgatgcattacatacttactgaagctcacacataagtagatatacagataaggactaattaaataaatcatttttcttatggcatacctgtaacaaatgctgtttgtctcctcttcaaaatgaatgaagcttcagaaagtccaattgatgtgtcccaaaaagcatacatataaatagttattaacactaatcttccagacttagcacaccacattgaagacttgctataagcataactctgtttctttgtcttcttacatccttagctgtacttttacatttaagtcactttcatccttaattttataaagagttctgtgcattaggcatcttctttacttagtttctaaagtatttccctgaagaaacacagtgggggattcactgatttaaaggtcagcatgttttaaaacaactttctagaaccattacacgattcacccctcgatgacaatgcatgggaacatattgttgtaatttttaaaaagcagggcaagagaaagacaccatccgacacagttcaagtggagcggattttattagaggaaagggatcataaaagggggaaatgggagaaggagactggtccctggggacaggagcagtgggagagaaaaagaaagtcggggggtggggggcacagagagagagggagagggacagggacagggacagggagggagaaatgggaggtgggcagggccattctaaaatggaacatagtgaataggcacgggtgctcttagtggcagcagctgaggtggatcctgtcagaactccaaaggaaggctaataaaaattcctaaatactaacagttgcagcctattaccatagccaacttaagttttcaactgaaataattttaaaagacaataatggtgagttgtcccaaggtatgaaatatatcactgcatttgacattttttcgcttgtggctgctgcatggagcttacttgtcgacaattaaagctatgaagatgtgtgcagtgtttggcaattgcatctttatcctggggaaaaataaatacattttagaagcttcagaaaattgagagaagaggaaagaatgaagatgacctgctttttaactgtcaaaagtaaataataaaggtcaacagaataactgggaaggccgggctaggaagaaatgaaaactatcaaagtgtctaacttgcataggagccagaaaactgacttgagaaaactcggtgcattggtggcagataacgctgttcgtggtagaaaggggaatgctgagaaaagctaactcatgaatatgagtatctacatgtgatattttgctctgtgtgtgtgtgtgtgtgtgtgtgtgtgtgtgtgtgtgtgtgtacaaatgtcttcttgtgcatttgtgacaaagaacagcctgcaagaaccagttgctctcttttagcatgagttcctgggaggatatcaggctctaaagcaggcacctttactctcagaggcatcttgctggtctggatgctttggtttcaatactctcttatctgtcaatcctcacaaattgtcactaaaacaaggcattcaagaaagagaaaacaataactagagagcaccatgatgtgtacagagtaaagttcccagttagcatcttgggcttatctgactctaagacaagctctgccttctctaccctctttggttgttgcctttgctccaacaaaataagtaggaagccttattctgtttgggaagtttttaaaaagacaagtagaatggaagaggtcaaaggtgaataacaaagactgaagtgtgattcctttgcactaaggctgaaagtataagtagcctgagtaaaacaacagaggcagaaagatcaaggagtctaaagtaaatcaaaaaggggagcttgtgggctctagtgaaaaggatggttctgagaacaccaagatttacactctgaatggcaatgaacaaaaggtaataaggaagatgggagatgtaggagcaagtgtggagagaagctgggtatattgcaggtctgggtatattgaagaatacgagctgtcactgagatacagataacactctaaagtggcagatgtattgatctgaagagtccaatgataacttggggacctgaacttggggaccaaagacttaagtataaggttagattttgagaacctgtgaagaaaggtttgattagagtactaaataaaaactagatcatggtcaaaattaaacacgtggtattgtcttctgaacatatggtttctgatgatttacataacctgcccaagctttgtctgatgtctactattgctagcctgggtacaccggtaatgtctcgaggcagttctgttactacaatggatttgctgttcatgtcttgtgggcagagggtagagcatttcctaaacatcttacaatgccctgggcagctctctccaacaaggagaattatcctgtgaaaaatatcagtttaggtgagcataagaaatcctgatgtaagctccccataaagcacagtcactttggttaccttggagggttgtgaggtttctgtgagataaagcaagcatcaaagattaactgtatatcagaccttaggtgcttaagaaaaaataagtctattgtggagtagaaaatgattgtgtggtggtttgagtaggtggaccccccaaggctcagatatttgaatgcttggcccatagagagtggcactattaggaagtgtggcctctttggagtaggtgtggtcttgctgttggaggtgtgtcaccatggaggtgggttttgagatctcctagactcacactacacccagtgtggcgaacagtcacttttgctgcctagagatcaagatgtggaaatctcagctccttctccagcaccacacctgcctgcatgctgtcatgtttcccaccatgatgataatggactaaaccgctgaaactgtaagacagccccaattaagcgttttcctttataagagttgctatggtcatggtgtttctttacagcaataaaatcctagcaaagacaaagatttcagtaacttacattaccaagatggtggggggaggagtgtggtgatgatatccgctgagaggcagtagcctggagggagaatgtgaaaatgaggaaatcgacagtcaggggcaaagaagcagacagtgatgctctgcaaacctgtatctctacctccggggaatgctgtcattctgtccctgaacctcagacagctccgggaggaggacaaaaagtgatgaccacattgaagggaaagttatagtaagagtgaaagatgagaataaaatgcaaagctgtagtaggtttaaaagtaaaaatgaaaaaaaggacaagggccaggaggacgatttgaactggctgtctggccacaaaggataactttatgttgtagggttagaaacactgtaatgctttttgaatgaaagaagagtctaaagggagacaatcagtgaaggagttatcactgacaggacaagagtcaagaggagaaagctgaaagatagtttgtaataaaaagagatctgcaggctggagggatggctcagtagctaagattgcttcctgctcttccaggggacctgagttaagatatcagcatccgaattgggtggctcagaattgtctataactctagctctagtagatctgacagcctgttctggcctcagtgggcaaacacacacacacacacacacacacacacacaaacaaacacacacacgtgcaagtgcatagatgcatgcaaacacgtagacacacatataaggaatgaagataaacttttcttttctttcttttttttttttttagaggaagggcattttttttttttttttttagaaaatagtgtaccttccatacactgtactgagttgtgagtgaaaaatggtaaaaccaacaccttaacattttcaaagttatgaacataaatgttattaaaatgctccagttacctgagctcagtagtgactagtgcctgtgctgagcatgcaaaaggccctggatcctatcccagaagaaaaaaaaacagcacctcccccccccaaaaaaaacatacagaaactaaataacaaactaacacctctacaaggcattgtggcacacatccttcaacctagcacttcggaagctcaagcagcattgcaagtttgagcccagcatgggctacatatttgtgactatctcaacacacacacacacacacacacacacacacacacacacacacacacacacacacaaataggaagtaaaggacatataaagaaagtaaatttgaggtcggggacagatataaaagagttactggcgggaactaatacttgaattgaccttgatgaatgagtaggacaaaccccagaaacaggaagaaaatactccaaccaaagagattggctagggaagatgtgacaggctctcaagtttagttgctggacattctttgccccatgaggacatcctcaagttaaccctcatggtgcagcttgaatctgctacattttaattttgctgtcatcaccttagaatttaaaagctactaaaataatgggtagccatcatagttatgagcaatgagtaaagttttgataattttgtgggtttttaaagtgttaattttcttatatctgtgcctagatccccagaaaattgttttttaaaaagataagtaaaagagaattcgttcagtgtacaatatacaatacacatgtaaaatgtctttatgtaacataatatttcatacaaagaatatacgataaaagtttttaaatgtaaattgcatgtacttaaaaaaaatagaagcaagcgttttcccaaaaaaaagtgacacaagaaaatgtatcttccggattgccactaatatttcttcattaagtttattatggactaattatgtctcttcatctgtacattgaggtccttagacccagtatatttagacacagccatgaaggaagtaattaagattaaatgaactccttggatagaactctaatcccataggactggagtccttgtgaaaggcagaaacacacactgaaaagcaggtgtgaggacccagtgagaactagctcactaagctaagcagtgacagagaagaaggcctctccagaaagcaatcatgctcagttcttggactgccagcctctaggatgctagagaagtcacttctgttgttgtctcatgtgttttgcatggggcagcacaagaaaagtgatgtgttcccctcattagcgcttttatagacagtatgtagagaattcagatgtttcgtctttaaagattgtgttggcagtggaggctggatgccagcagacaggtaggggattccaaagcataggcccagctatttaccatctgcttcagcgttccacattgggagaatggtgttatcagtagtcagtattcagcattcaaataccaaagaaaagcttacacatgacttcagtgagttgttttagccttgatttctcatctgtaaaacaagagaaaacccatgtaaaaacataaaaactaaaaaagtgttgtttttcatattttacttgatattttttataaactccataagtattaatttatgagatttaagcatattttaactatgagtatctaatgattctggcagaaatatatttatttttatttttattgtttgtcctttggcagtttcatacatatacagtgtgcatttaaatgatcagaatcccctcatctcctacttctatgtcccctcctgctcgctacaagtctgcttcccatgttcaagacctgtcttgttgctgttttttgagacccactgattttagcttggatcactctaagagcctgaatgggctcctcagtgggtaacctgatgacaatgactgccctctctcagaaccatacaagcacagaatagtagggtctctttggttctttaccactcagtgattgagagtgacattaatagccccagtgttgtgtaagcagccatcacactgtaagaacatgattgtcttcattgtacaatgcccagaagacaatttcatggccattccttctgtctgcattgttccctgagccttagaggtgtatgatagaaatgtcctgtttagggccaagcactcagtcagtcatcacggctctcaaccatctcttattctcagtcaccagcagccatgtgtctctgcattcgccacccacattgcaaataaagtcttctctgattcaagctaaaagtggcatttgtctgttactttaaatgtaagcatttaaaaggcaacttgacaccatcacggttgagctaagtgaaagtattactctcacccctatgatctaagatgaccttggctatgggtctttggccatgcttacaatgagcaggatgaattccttcctgtgactcagacctcagatgcagtcagaaagagatgttgcttccttaacagttgttagattattgcatagcaagtgcttcttgcctgcctgaagatggatgttgtagtattcagggtttacagctggtagagacaaattaacccctgcagactttatactactttctagcactatgaaagccagccagcatgaaggaagcttccagctcagttccagcccaatttccctacaatttgcaattcatatatgtgccatattcagcaatacagtcttagcaactagttctacttgagtgaccaagaattactttcttcccaggcacgtcataagaacaaaaataaaaagttcagtgatacatttttgtaagattgtcaagctagggactaacatcttcaaagaattttcagtcttaattgaaagttttctaaaaaataaaaaaaagataccatgggataaatttattatactctctaagggattcatctataactcttgtaattacatggtatttttctataccacctgtaaatatcatacagctttaaatagtcttttattaaaaatgttgtttaagggctggagaaatggctcagaggttaagagcactggctgctcctccagaggtcctgattttaattctcagcaaccacatggtggctggtgaccatctataataagatccggtgccctcttctggcatgcggacatacatgtaggcaaagcattgtgtacataaaaaataaatcttaaaaaaagataaaaataaatagaaatattctttaaaactgccattttatataatcaatatagactgcagtaactaattttttctctctttttattattattaattcaagttagggaacaggcttgtttcacatgtacttcccctctccctctccctccccttacccccattccttctcccccacctccaacctaccccccaccccatccacccaccactccccaggcagggtagggcccccaaccggggctccaccaagtccaccaaatcttcctgtgctgggcctgggtccctccccatgtgttcagagacagagtgcaacccttcaagtgggatgggctctcgaagtcccccacatacaccagggcaaaaagccagtccactccggaggctcccaggagtgcaggggcctccccgatgtcatccataatcagggggctggattagtcctgcagtaactataatttttaattattttaaataaatgaaggttatttttcttaaatccatttggagagaatttttaataaattaaatgaattgataatttaaaaatattttaagaaagtatgctttaaaatattgcctatgtaatacatttgatatatgctttaattttttggtttttgaagatgggaaatctaaggaaaaatcaaatgtttgtgcatttgtgattcttaaacaaaacatcataaaacagaatcttcttatatggtataagaaaagttaagtaatttagtatttatgtttagtttccacagggcaaaatggattattttgattaaactaatgagacatctatgtaatgtcagccttagctttcaaaacagtgacattttacctagactatcaatagaggagaggtaagtcatagatccactgattgcagaagatacagtgatatgtgggaagtcctggcactggtaactcaggtgttctgatgccctgtgtgtcaaacaattttatatgttattttttaaaacgagtgtattttttcactaggaaccaaaacacaggtagagtacttattgaagttataattgtctgtaatattcatattttgtatagatgaattcacaaagaaacaaaccttggattagaaacaaaagtttctgtcagaaaagggtcttcggatcacatgctgagataaaacaccatgaccaaaaagcaaattagggaggaaaggttttgtttaggcttatacttcagcattgttattcatcactgaagagaatcaagacaagaactcaaacagggtaggatcccagaagcaagagctgatgcagagaccctggaggggagctgcttactggcttgattcccatggcttgcccaacccaccttcttttagaatccaagacaaacagcccagggatggcatcacccatcatgggctgggacctccccacattgatcactaaatgagaaaatgccttacaactggaactcaaggaggcatttcctcagctgaggctccttcctctgatgactctagtttgtgtcaagttgtcacacagaaccaccgagcacacatgctcagacatgaacgaataaatgaaaggttgcatccatcttttaagtttctgttgcaaatcaggcggtcttctagtatacaaaaaaaatttaaaaaaaaacaactactgctggataagataggctaaggccttattataaaatctagattttaattttggggtagacaatcaatatttaaacaaagttgccttgtaggtgctaataagtgagaatgagtcaaagggacagagaattagcagtaaggttggaggttaaagattaaattgtattggctgccctgggaagacctgtctgaagaggatgctgaaaactaaatagtattaaaggaaactttatgtgaacacatgggcaaaaaaaaaaaaaaaattccagatacaggatgtgtgtcttaaggcaaatgcaaggaagtaatcagagtagttttagattccagcagactagtgacatcatctgactcatgtttcaaaagatcatcttgcctgcttacaagaaagagtgtccataaaataaaacaagatggtcccaagacaagcactggtggataacatcaaaggacaaacagaaaaggggttaacttcaaattatcagcagtatttagtgatagattcaatataatggtggaagagaaaaagaacaatctaaaaagggtttaacaaaactttatgtgatataccagacagaggtactggcaacttttcaggctgtatgagatctgctacagttgttcaactcaggtgcatatgtgaaaacagttgtacacagtacacagaagaaatttgtgtgtggtcttatttataaatacatacggcttggtttgtagatgatagtttgctgatctcttgattcagaagcattccttgaatgcaggaaaaaatggatgtcttctgagaaacctcattattcagaagagtcaggtgcaatgaaatccccaatctttcacagcagtgtcctctttcatgacgggctggagagagcagacagtcctgttctccgtgaaggaaggatggccatctctcagagaagcaccacatttaagctaatctaatcattttagaaagcagctaaaagcaaatcagtgaatgctcagattatggatatgcttagttttttttaattacatgtttgtttgttgataatattagttcaatattggtgatagtttggaatagtcgatgattattatctgatttgcactatgctatatatgtaccttaattttcattaggtctactttttatttgtgtgtgtgtgcacatgcatggctgcctgtgccacacgtgtgtgatggtcagaggacagaagtcagttctctccttccaccatgtgagttccaaggatccagtgcaggcttggcctcatcaactgaaccatttctacatcacaaagccacctttaaaaataattgtttatatatgtatatataatatactatgtacatatatatcaattaaaatatcagaaaatccatttctgatttcaggttttccatttgttctctgtcttataatgttcaattgtttagaacatattattgacttatatagacattcatcaagaaaacaaatctgcttcaaataagagatgaatcttgtaaacatgtttggaatttgagaactcatttggaggttctaacataggagtgaagttactcacattcccttcacctaggaccactcttcctcctcttctctgggaaggtcatccttgtgcaaactcattctcttccactttccagagaatgcaaagcttcagtggagacaaatatgtgaccatgagggaggaaggagacactagcctaaggagccaggtcagctgaaccaccccagtaatcaaaaaagtgacagatgtcacagcctgattgctctatagatcactccctattttgaatttaaaagagtctgcttaattcattttattttcattattatttttattgcttttaacccactgagcctaattacctacatatgattactaaacactgtatcaaactaggtatagtaaatcatgaggatttagacaactcatatgaatatgtcttttatatttaaacatgtacatgacttataaaaagtgctttataaactgtaaattatgtttaaatgcttttctttatcagcaacagtgtcgatacttgatacttggactctatcaatttggacttttgtcctcctcagagttttaaagcctgtttctctttagacaaagtatcatcatattacaactgaagaacaaaattatacacattttagacatacccctgagtaatcagctcccttcagaaagatgttttggtttaataatgaaaacatcttaatagctgaaattattacccactgagtcaatcaccataatgtcctccaacagacaatttcttagaatgagcagcagcctttccaatgatgcctcttaagaaaaatgtctaaaaatattaacattcttgatgggaaagcgttgttagttccttttctcttgttcttttgctttcttcttcctctcatctttcatctgtcaccttcaccattgttctttctcccttcctctctgactttcttgtccctctgcaccttgcaattttctttaaactaccagtactagacacacaggagacttcagatttgttcttcttctgtgttttttcatttatggttctacattcaaataacaccattgctgtagagaatcctgccttgacatttgaaagaaatttatttctttttatttgatgtgcatgtgtgctttgcctgcatgtatgcctccgtactgctgtgtgcagcacccacatatgtacgaagaggccatcagatactctggaactggaattacagatgcttgtgagcctctgtgtgggttctaagaatacaattcaactcccctggaagagcagccagtgctattaaccactgagccatctctccagcccctgcctgacttgttaaaactggatccccttctcagaaaagttagcataaatgtgtatgtgcaactgcatgtatacactgaggtatgctgttgagatcacctgaattaaagatttttacataatatagctccctaattgcctctgaaactgaacctagagtatatatgagatttgttatttcattttaaaatactaaaatatgaattacatatgactatgagtttaaagaatttaatgatttatcagtagttacttgttttaatagttgataaatgttttgtcatttctattcattcggttcctaaagttgttaaaacatcttactaagaacttcagaatataacaatggtgacagaagtctcctttgttagtcaagtcatgcaacaagacattaagaaatattcagaaaagcattcaccactgtattaatcataattccctagagtaacaaaacttaaatagaatgaatacatatataaaaagagatagatattgatagataggttgatagatacatagatagatagatagatagatagatagatagatagatagatagatagatatctcttgttttcttcctgccttcatcttccatctttccattcgagatttgttagaatggctttaatccaataatggctgcctaagaatggaaggtccaagaatccagtagttgttcagtgtacagggctggatgtctcagctggtcttcagtatatgctggaattccatggaagtaggctttaatgcaagtaaaggaatggtttgctaatgagagcaagcggcctaagagaaagcaaacttccttcttccatgctctctcgatatgctgccagcagaaagtgtggtccagactaaaggtagatccctcccacctcaaagatccatattagaagtggatcttctcacttcaaattatttaaataaaaaaaacatcactctttggggttttagttcattccagatgtactaaagttgacaaccaagaagagccatcacaaacattgacaataatgtatcctcaaagacctatttgacaaggatccacatagatgttatgtattcctgaaagggaaaaagtgtacaccaagtagtggatggccttcctactcggtgcaaggcccttggttcaattgtctgcactataataaactggctaacaaataaatttattaattaattctgtaattctaccacatagcttatcaaagtgtctttagatatttattgaaatttcagcctcttcttaaagtacttactattaagtatagttggtatttttgtttgtttattttatttaatctttgctctttgggggcctgccacccagctcccaaataaatacatggagatttattcttatttatgaatgccaggccttaacttgttttatttctatccagcttttcttaacttaaattatcctgtctatgttttgcctcttgaagtttacttatctctattctatatacatttctttacttcttattttatgtctggttgtgtagctgggtggctggaccctggtaaccgcttctccttttctcactcctccccctctctcttttttttctctttattctccctgcctgccagctccacctttttctctctcctgcctagctattggccatccagctctttattagaccaatctggttttttagacaggcaaagtaacacagatttacagagttaaacaaatgcaacacaaaagaaagtaacagatctttgcatcattaaacaaatgttccacagcataaacacatgtaacacatgtgtatcttaaactaattagtatcacattagtatcttaaacacattagtatcttaaaccaatatcccatggcagttaggtgtctcctttttatttctgtttttttttttgtttttttttgtaattcacttacacataatagttgaccgtttgttttaaaggatttaccattttatcaggataaaattattcaatgttaaaatattcttttgactaagattgccctccaaacaaaaattatttaccaacaatatatggccctaagttcccaaaggcaaaaatatggtctttggtatgtttatcatgaaaagaaatccagtctagagtacaaatatttgacacacagcatacttactgcttcattatatatgtgtgtacatgtgtttatgatatcagcgatatgtagatagatattctatgacatatgtacatacagtgatctactcactgttaaaatattgcttaaagttttaaaagatgaaattaaatatgtatacaatgatgaaaacttaaaattaatattgaatcatagctacttaatgactctaactctagaaatagcacagctacaatgagaacaaatgaaaggcactcccctagtcacatgtcaccaactaagcccattttcgaatgttaagagtttctctgaaatcaaactttctccaagtttagttatggaccaatacattttatggaaaaataagaaaattaatcatataaagaatagcgctgctaggtgtagtggcacacacccagaatcctaccagccaggatgctgagagagaaggatcatgatgagttcaagacaacttttgctgcacaataaattctaggctacgctgggctctagcattgataaattgtctcaaaataaactaaataccccagtgacctaggttaaaatcaaatactaccattttttcagtagtaataaaatgcctcctaatgatattctgctatactcatatctcagtgccttgctcagccatcatcagagaagcttcctcctgcagctgagaggaacaaatatagagatcaacaaccagacattgtagagagtaagagatcttggaacactcagccctaaataggatgtcaccaacaaatcccttctctcagggctcagggaaacctgtggaatagaaggcagaaagagtctaagagccataggtgatggaggacctccaaagaaagaaggccctctaaatcaacctgatccaagtgtgtatgaactcacagtgactgaggcagcaccagcactttgcacatgcattgtggctcccagttcaatgttttttgtttgtttgtttgtttgtttttaatttatttattagttccagttagggaacaagcttgtttcacatgtaagtcccttctccctctccctcccctcacccccatccctcctcccccaccccagcccaccccccacccatccacccaccactccccaggcagggcagggccctcaacggggcctctgcaaagtccaccaaatcttcctgtgctggtcctgggcccctcccgatgtgtccagggccagagtgtaacccttcatgtgggatgggctcccaaagtcccctcctgcaccagggaaaaacactagttcagtgttttaatgggaatgtgcaaactagtgggtctctggttcttgtgccttctcttaaactctttccctctgtttgttttgtccaattctgacatggtagtttttatgtttattataatattatattttaatttgttgtcatccttcagaagcctgttttctcattggagacaagaggggaatgggttggatgggatggaggtggaaggaattggggggaatagaggggagggaaactgtaatctggttatattaggtaagaaaaaatctattttcaataacaagtaggaaaaaagaaaagctaacattttatgctcttatttgagtgaaaaattaggtttttgttccctgtctccagcttcagtagaatataacagaaattattggaatgtgtaatataaaagtaaatacaatataataatatgttcgttatctaaaacaaacgtgaacaaagggaaaatgtctgaaatcatatttgaagtttttctcaaacagggagtatagttatcatttactttattattggtaacatttttgaaaaattttagactgctgcctattccttcagtataaattaataaatttattacattaaacttcatattttgggatgagagtcttgattttctgggcctgtgtctcaaaacttcctttttttctccttttgggtatcaacatgactgtgctgagcacagcatagtagtgacccagactcccagatattatcaccagagatctaagataacagctgcctgtcctctcttgttctattcttctttatagttttctgaaaagtaattataagtggaagcagttaagtaactttgaaatttaaatcaagttttctgctgtgtttcaggaactgactatgcataatttattatttgatgctcaaaatgcatgtcctttagagattaagattatgaaaagactgtgggtatgatttggtgttacacagcttgtctagaatgtaagagaccctagatccaatccccagtacttccaaaaggaaattgtacaagtggcacaggggagaacacacaaaaagtgaaatgtttgatagacaagtgtgagaactgaaagttcagctccccagtgctcacacaaatccagggctggcataaaagcctatctggaatcctgtgcttaaaatagattccccagagcaaactggataggttgaagaaacaaacgaagagttctctcttcaagggagaaacccttactcaatatataacattggagaaagttcaaggaagacatctggcatcagcctctggacttcacacatgaatacagacagacagacagacagacagacagacagacacacacacacacacacacacacacacccatacacaaaaaaattatagaggtatagaattatgatttaatatgatactttaaaagtccctattaagagcctatgtagtcctaaagtttttttttaatcactctcttcaaagcatggtgatttgaaaataagttataatatagatttttgaataggaaggagaatgatcatctccctcctattgggtccatcacatttactaggtgtaacattagattaagcttctaactctatcacaaacccaccaataaaatgcaggtgatactaactttcaatgttattgtatggttcttgtcaccactgagcaatgcctggtatattcattactcttaacactgtgaccaaatacctgacagaaaagaaaaaaaaaaaaaacacttaaggaaagaaagattcattttagctcactgttgcagagggtttggcccatggttacttggctccatgcactcagacagaaaattataacagatggatggggcaaacagaaagcaagtaggcaccagaaacaaagtatcaccaagtacctggctcaagtgaaccatttcctccagggaggtactacctatgaaagttatcagaactacacgagaccatgaagttctaattattacatgacagtccagacagacttttattgagtttcttttgtgtttctcatccagtctatctcagtggttgccaaatgtcatgtgtgacattgtgttattggcaaagtgttattgtgtctggccgcattcagtcagtttcaagggaattctactatgtgtgaattcattatgacttttctctataacattttatattttaagcatatgatagatgattcttcattatatagagtaaatctaaagacagtcctaggtacacaggagatactgaatagattggctttaagtagttgatcttcctgctttatggcaaagtgagtttttttctccatttttctttatttgaattagaaacaagattgttttacaggtcaatcccagttcccactccctcccttcctcccctaccactcccaccaactaaaaccctacctatcacataagctttctgctccccagggagggtgaggccttccatgggggtcttaagggtctgtcatatcctttggggtagggcctaggcccacccccttgtgtcttggctcagggagtatccttctatgtggaatgggctcccaaagtccatacttatgctagggataagtactgatcacaaagtgagtttttttttttcactttcttaaatgggttaattttcctataattcttactttgcctatgatgattagttgctttcttttcaatggagatgcctcttttgcttgccttttagaggtttcatcaaaattaataaaaactaatgctagttaactaacagtgtaagcattccctcattggcagatttgttgttattcttatttcagtttgataagaaattgactcacaattagcatagtctagatattaatccacccaattggctcaatatcattttttccagacatagttgttaaatgtgattgggtattgggtgtagagattggccagatagaagaagtccctgacctcataatttttatcacccaatcagaggaaattctgctgtctaatgtatattttagcaatgtgtctaaattgtttaaacttacttttattaaaacagctttacattcttttactattaatgactggttgccattattttgactttgcagagtatttaacttgattactctggttttcctctgacagttcattcaagcatttgattggaggattggatgacgtttctaacaaagcatatgaagatgcagaagcaaaagcaaagtaagtgagatttgctttggggacttcatcttgataaaaataattttaataggataaggtcaaatatttggacttcctgtcagtgctctggcagtataactctgattactataaagcaaataatgtagttgttacatgatatgcttacttaatattgctattttcaatatgaaatcttaatttgtaaaaatcaactcaagaaggtaagtggtagcttaaaaatacaatataaacagttataataaaacatgtaatagtcagactgaaaatactttctgatgatattagatgctaaatatctcattaattatagtttttcataactgcaattcttctacaaggctgatttgctataaaacaaagtcttaattttgacaaagatttgataaattcaaatttttttattattgaaaagaaatatatgttactttgaaaacagtagtggtcttcataatcctcctccttttcaccaaatataaactgacaattcatatacaatagaaaacagaaggaataaacataaaatttagtgttaagcccatggttcacatcaaaattaatcactaattttgtagtaacctcaagcacaaaagaaagaaaatattttgctctaagaatttgtgaaaatatcattttgcctaggagtaaaatattaagaactgcattcatattaacttctgaaatacatgcaggtgtgtaaataagatgaccaatgtccatcttaaaaatgtaagcagctactttagacttacagaaaaagtcaattgtcttatagaacagagtctagctgctctgctatatatctgttttcttacagcttttggtagatagctttcctataactcctattattcaagtaaaaattggtaccaatcttagccctaaaattaccagtgatgggaaagtgattgtgaatgagacccttctcaaaatctattggctttgcagagataactgacagtgtatgaattctggccattcacagagtcacttacacctgctgcacttcaagggaataaaaaactgagtgtacttaacccagatttaaacagctagaaggaagatttgaccatagtttgtcacactgtcatatgaacctggacaaaagctaaaagtctttgttcctctgctactcttggtcacgactcccaacacctgcctctcatggtcagacagcgcatctttaaagtggcagctactgttgcattttaattgatggcattatgcaaagcctttgtaaattgctgaaaagtggatgaccttgttgaagtaatttttggaaacacactttgatatatgactatgataacagatattaattattccacacacataaaatattttgcatgactaagaagtatttaatcttatatagcttctcatatttataataacttattaaatcatacttagcctagaaaatatctatagatatagttttatgaaacagtaacagtttagccaaacagggttaaagaataagaagtaacaaaataactgtctacatcaaaatacttcccaatgtttgtttgaccggtgggtttgctagactataatttagacatcatgaaacaagcatatagtcttagggtatgcaacctgatttgatatatgtattaattaagaattaatcacagtaattaagcttactaaccacatctatctcctcacataagttattcttctgtatgtggtaaattggtcaaattctgattaaattagccatgacttaaaaaataaccacagacttgattgtaattattgatttggttagccaagagttggttcagctaccagatgggatcaatcactagtcagattaatcatcaattagatcaactattaagtgaatcaaacttggttatagagacctctggttaggtcagctactaatctgatcagttgctgttgaacaggccattcctcagatggcctgctgattgaaaggctatcacagaagacttattgtcttagtaaatttcattcagaagatatttatcttaaattgtttgattattactaaaaccaagtgaatgcatgcttagtattctttaacattaattattacttaggaagtgtaaatagtttgataaaaaaaacaagcataaacccctaatcaaattctagagagaatgataagttcattctttgaaattttctcacaacaaatattagagtagttgtcattatgctttctacatagttagcacttcatacagtgctaacaaataacatcagaaggtgtctgatgtagtagccatccctcagtctgatgtgcttatgctcaaaaggaggcaaactatgagtttccatggggtaggtttttatccacactagcaagcacagacatcctccttttaaaaagcttccccccccccgtgcaattgaaactaggaacaccctctaattgtttaaattcccttgataattctgttaaagtctttacatttctatatagaccaagaaacctaaagcaggtaccacagaggtgatgtttaaactacactgtgtaaattgtgttttttcaaggtccctttggttttgcaaaaagcataaaatttgagggtaatattttttaaaactccacaaaatgatcatgttaactattcatgtaaaacggttattttttccatgtctattcttatttgggatagaggacataaaagcaggactgactgtaacaactgattcctttgagacatttaaaactcagaggtgaggaactcattacctattggcataacactctccatggcagactgattgttctcaagtaaatatactattattctcagtaaacccatactaagtatgtagctcagatagtccaggaaaactgacttgaaaaaaatgcaatggttttcaaaactcttctactgaaggatatctgtctctgcctatattgcaatatatctttcctaaatttattctggaatgaaactttactcttatggcatattcaggctttcttaattgctgataatcgtccactaaaggctttgctttttaaaatatgaattatagccacaagggttgagagaaaaaatataatatcaaaattaaggatcacttggaatataaagtagcatgtgtaatgatatgtccatatcattcttgccttaaagatactcattgacttaataaaagcatttttaaacaatatattataatatataataagtgtaccttgtagtataaaatgtgcatactgatttaaaacacatttttaatactagggaatatcttatattttgaagggaacctgatatatatagttattttcacctcatgcttctaagaataagttatgacaattgttaccagatgattttgagcatccttcttccatccatgtgtaaggcttgtcttgtaaaaccatggctgtctatagatctaaatgtatatgttttattttattattttaagtatttttgatagacaagtctatttattaaatagtatatcttatagttagaacatcatcaatgcattcattgctgaatattttgcttagaaacaataagcaaaaggactcttttttctaaaggaaaaagccctaattcatatatagtacacattatattcaatgtagcttatcataaaagcctttacagtaaaaattacactcttaaagtatttcatgaatgccatcattatattcttaagttgagggtttatagtgggcaaaaattaaatgctatttttatttataatgatatttgttattattaaaaatgttttgtacttttactttttataaaaatattatggcaagatagagaaagaaaaagaaaaccaaccaagccaatctaacatatgctaactacctttgtgtttcagtcacacttacatggtttatatatgtttttctccatttagtaccatctcattgtaaacatactgcagccttctgtgttttgttgatatcatcttagtagctgcctgggaacacagtgaatggaaacctgttttctagattgattcaagttaaagacttattcattcagtttatttttcttttgaacataagttctcaatcactcctaaaaacagaacaacacaaacaaaacctcaccaatagcaaaagccacttacttacacatatggtccatccagctgtgcaaattactctatatcatgcatccatggaaagttgcagtattttagactagttggtccatctgccacctgttctatcctgctgtcttatcttgaagcctggtgatatacgtatctaggtacttccaccgagatattctggcagctgtatcagtagattagtgtatgaatttagtaacaagccaagttgatgagacctagtattgttctccaggagaacctcatattaaaaatccatgggaaatatgcccatactttataatctgcaatgtcacttgttatataaacctagactccctctgataactcatagctccccgtgcacggccttaccccatgttcattcattttttgtagacattgattcactcagcagatactctctgtattcctccctccccataaaataatgactaaaacagatgtgttccttgctttcatgataaattggtctagtctgagagagataaacaatcactatgacaagaaacctatgatgacatggcattatcagtgcatttgagctgaatcctaagtagttagttgatgaaaggtaggcattagttgaagtgggctaggcaagtaggcacaaagagaatagagaataagcaggcaaatggcaagtgaaatgctagaaggaactggtgggaatggagaacaagaggatcacgaaactggggattgatttctgagaaatttagcttttaaaacgtcaggagaaacaatcagaaaagactgaggagacatgaaaggtacaaggaaaaccagatgtatatgatgacactgagaccaagaacagagtaatgtgtcttggtcctaatgccatgaagtgacaaatatgaccaaacttgtcaaaaaccccctggaatatccaagttgctttgcttctcaactccttccatcctgtaccaattcacctgttctatgcctcattcctcagaagaatatattgtgttttaggcagagagatgagaggatgttcaaaagagaaacatggagccaaatcatcttttagataagagaattattaaaattggcaattggcaatgaggaggtcttgcccagtcaggaggcagggttagttggcatatgacctatgctatattctcgaagtaggaagcagggcatatgtgacacataatatatagcaagggtcactctatctgagtaaaggagttggagcttggttaaagtgtgtgactatagcatggagttcaagttaggctacctctgaccactagagagtgagcaagtctgcttacagccctttctgcctagggcttcattagctgaaaagcctgagttcaccagcaggatccatctaacagattcacatggcataggcagaatagtttaaagtaagcaagaaaagaaaattaatgcaaggagccaacaaataatgaagatgcaaaacaaggcgcctcggtcactgtacgagaaaaaaataacggacaaaacttgacaggcactggagctctctctgacttactgttgctggacaataaaataccacagccacctctctgttcccctttgtaagaattaaccagagtattggcccaatcgctctgctttgtgttgaaacaatcctattctcatgataaacgctcattgatataaagcttcccttttgtttacaagctcatttgcaaaggaatgttttcatctgtttgatattttcccaattacttttggtggtgagccttgtgacagtggtaaaagatggcctctccttccatttcattagcagaggaggcctttagttgctcagtctgtttgtcacagggagcttgctgctatttctctttgctgtctggcagcagattttgctcaggccttcgatcattaactcatcaaatgccaaataaccctagaggcacaagaggccatgcaaatcagaacccagggtttctttgcttgttagcatgttctgagatgccttgggggtcatctagcatcaataaacatatggtttcaaatgtgcaatcctgttaacaaggagctgcttttgtgaacacagactttgaaattcaacccttttttccccttgcccttttattagattttttttcctccctggcctcttggaacaaaaatcttaacattcccacaatcttatcaacattttactttaaacaactcagtcttgatctaagcaattctcaaggaaatggacctagaaaattgtttcttcccctgtggaaagaattcaagtgagcaatatcctgttcccaaatgagaacactctgccaattaaatggaaagaatgctgtgaatggcattatgaactaatcctcagcccagaattggaacctcctgaccacttgtagtgtgagctgtcacagaatagccccagagtctgggcaatacgaattgttttccattttattgtagggcaaagggtagggaataagaaaattctgcagcatttggccctggggttggtttttaaccttacaagaactgttttttgaatttcaagacatgttgacaggctaccaaggggtatagactagtttctaagacaaccaatatgaacattaatacttcagcatgacttgagttgtcaaaacacataaagtgactatctctcaaggacagtgagactgattcagttgcatttttaaaatatgatttcaacataaaactacttgtcctttgataggaaatttatatctatttaatttttaaaaattaagctctcaaaggctattggcttatttctttttcactctgcctatctttaagactccccaggtagcaagactttatcaatgagatcccaggatgtccttgcatgcaacattttctagttaacagatagagacctgaagaaaccaaaattctagcactgctgacttgtttgacaaatatagacaagtccatgtgttgtcaactctatttatttcttctaagaaggcactaccaatcaacaaatgggcaaatgaactgaataaatagtttccaaaaagagaagcacaaatgggcaatactacttttaaagtgttcagtctccctaatcaagaaattaatactactttgagatgtcaccacaccccaggcaaaagtttgtcatcagtaaatctaacagctgatgttggagaggatgtagagagaaaggaacccatatatcctgtcagtggtgttgctaattaatacagcccttgtggagatcaattgagaatttttttcaaaaacattagaggtagacctactctgtggcccagatatttcactacttgggcatatacccagagaattccatactctaccatagagatatttgcaccccatgtttattgctgctttattcactagagcacaaaattggagtcagcataaatgtccatcaacagatgaataaatgggaagaatatgacatatatgtatagtagtgtatatacatatatgtatatgtacacatacatttatatgcagagagaaagaattgctattaatctctaggtgaaatgggttgatttaaaatgcataatattaagcaatctcaaaaatgcatgttctcctctccttcatacatgtcatctatccaataatgcatgtatatataaacaaatgtgcatgtcggcacagcataacataacaagaaaaggttaaatattaagaatgtgaaaagattgaatgcaggcagtgaacacaagttatgaaagttataaagctaattgtttttctagttctaactcttatgggtttttaatttttgtggtgaataattgcaataaattgtatttgatagtggaagtagaatatacaatatgaaacttcacagcttcctttcagaatgagtactctaattgtgtagaagttcaatgagatgcatacactttgcatctggttaattttggtatgtagctttttttaatttgcacatttttaaaaataaaagttcttttgaaaaattaaaaagaaatgatatatccttcccacaattctcatattcacccatggtaactgagaattattttcaaaacaacaagagtgctttagactctagataactgggtcccatgcagcaataagactggcctttccaatgcccaaacttgcacaacattcagaacaatccaatacatgtatcttttcagtattattcatgtcctaagcctgtttgtaataccttttaaaagcagaaagataaataatctagtgtatccctgtacattcttgttagtttcaagtaacaaatacatttgccataaaactcttttatgacttatgacttacaaggatatagcatatgtctaaacctgctttgtgaatttggatgggggaatatttagagagaaaaactgcgagtaatgctagccagctgttggcgggttgagctggctgatgcgttgataagggcatgtatacagtgagaggagcatcagccagggtcttacagaaggatttcctgacagcaccatgtgaacttgagcaagcaccctgtgggcttgtttccttatctgagggagaggtggttctaaaaccctccctggctttctgttttaaagatttctaagacatagaaggtgcacactcgggcactctttcagaaacctccctcccatttgtccatgcaccatgttaacattggctgttttctaactgaagaacaaagatatctctgtggcactaacagaaagcagacttaagaatcagcaagtagctatgtgtgctttttaaaacagtaagtgatattccttcccttttctgatttttaagtattgctcacagtacttacgctatttaaaataattactaaaaaaaatgggcagatttgcttgaagttagttatggtaattcagaagggttaaataaatcagcccatagaaacagaaattttcattttcaccactatacaaagaatttttctcttcctgatatgacatttagatatgataataagctaggctatctttcaataaagaactattagaaaattatagagtacttttaaaactggaatatgttatagtaatgtttcccaatgaatcctttctgaaagaaataatttttaagtaatggcttaaatggcagcacaaatcagttttgatacaatgaacataatatacgatactaatttacatttttaaattgttacttgaaaaagacatgatatagaattggatcgtggctattgctcagagccatttgcatgtatcacatcacttgacttcagcgcataaattacaggtgttactcagctttataaagtgcatccatcactttaggcatccagcctgctccctagtttatgaaacatgaagagatagaaaacaggtgctattgcttcagtcttcacaattgtaacaagcaatttagacactctcaataagttactgattcaacactttggatagctgtgaccccaatgtacttgaaaaaaatagtgactctaagaccagtttgggtttaagggcttgtaatagtgaggtctagtaacaattccccatctgttgtttgtgtatatggtgtaaaaattagcatagtatgcctgttgtggtcataaacttgatttacagaactgtcagtttcattcaaagtgtgtgttttcctaaatcagattctctgctcatcatattagtgtgaaattgttcgtgtagactcaggttctctgactcaaacctgataactttattataaaaacaatgaaaagagcaatgaagaacatgctttagattgcttatcaactttacattttaagtatgttcaaaagtttcctgcagtctcagaaaatggccaccacatctatgtgaacaaagactcaatggcagacaggacttttgacagtataaactaggatattgtgttggtctttttctttaggaaactgttcccatgtggttaatattagtattttcttttgcattgacatgaatatcagagcaataatttcatgctagcacaagttggagagctgggaggaagttaaagaaagcagagttgccaaagaagaattgaattatattcatgcatatttcaaccaatggaaacatatgcaaaaaagtatccataagattacgtgatccagtgacagctgtcttagtcctgaaacactctacattttcatatactgaaaatacttcatgagtcatgttttaacagcacactcccatggaaatatgcctataattaagtgattatgataccactcttaataagcacatgtatatgccattaactatgacacaaaacaacattgttcagagtatgttttttctagctcatactttcaactatttattacacctatatgccacatgataaatcacagaattcaaagtaaattgattttttatcttaaaagaactcaggtacttagaaatcaaacataatatttaaaaacacaaactcttagaccaatgcttctctgtttgattgaaggcaatgcttattatctagtttacataatttctcttttatatattgtcatttaaatacttgtctataatattttattttaaaacactgtgttcttaataatgccaatatccaagtaaataaaattaggaaactcattttattaattgcatcataagagtctaccaatattcgaccatgtgtaaaccactaaaatcgttcaagtattattttataatttctcatactgtgagtagtggagtattttagaattgcatcactgttgtcaggtatcatattacattatttaattcacattaccaactgccttctagaggcaccagtgtttagctatcaatatccatcgtgtaaatgtaacaacagcttcaaaatcagtgttaatcaatacaattattgataatcttatttcataagccagcctttgtcgtatttgtagctatagaataatcactggtgtctgtattagtacagggtttttttcaatcttagccatatttcaggctggataattctaacgtttgaatgtaggggggagaatatttttgtaagatgtagggtgtttagccactgacttctatcacctggatatcagtgctgtatcataaccctcaactcctgagtcacaacaatacttctatacattaccaaatatacactggagaacaggacagaattatagggtgaaacactgataatctcttattaatagatatgggggcatgatgctccacttccaacataaatgtttagctatagaaagaatatcaccacccttgtcagaattttaagactttcattttcaatttcaaaatgtgtgatgggataattaatttgttggattctgcttcatcagatgctgaatctttggttttaaggtgtcagcattggtaggttagctgaagctggaaaaacactcattttgattatgtgcgttgttggctagtatttttaacactggatgttatatactgtaatagtctcaaaaatgtaattacttgttatgatgcaatgagttttctttccattcatataatttcttgggttataattttaaaaacctggaaacaattttacataaaatgaacatttactattacattgataatgtaatacaaatgtgtattgtgacattaaacgtattacaaaagagaataggctacaggcaaaaaatagaggtgttttggggtactgaaaggtatatatttaatgagcttcttcaaatacacatgcacacattgttgcattatatgttctgtggacatggtttgattaacttttagaaacaaagggcctggcactctttcaattcttcctctgtgatgttggctagcaatagattccaccagcacagtgccatgcagtcatcctcctgcctgctgacacgatctcagtttctcatgtgcttccaagagccacattctggttagtttcacttcctactgatggaagaaacatctggaaattattgaaagtattagggaggcacagcctcagcattccatgagcttccagcatctacatatcctttaatgcagcacaggacatggtgaaatttttgtgtaaaaaaaaaaatcaaggatgaaataagaagctagtacctgtctaagtttcattccctgttgctgtgaagaaaataaacatgcaaaagcaacttaaaggagaaaggatctaggatctatttggctcacaattcacaattctatgctacactccatcactactgggaaatcaaggcagaaggagcttgaagcagttagccacatcctcagttgaaagagaataaatgcatgcatggctgtgctcaactcaccatgttaaaaaagttcaggattccccagtcttaggtgtggtaacacccactttaaggctaggtcttccatatctgttaattcaaccaagatgatccttgaagataagcacacaggtcaacctcctgtagacaattgcattgtctcattaaaattccttttccaggattgtacacagtccacattaaccatcacaatatccttcagcatttgttagaaaaacattataatttctgagtgatttttcaactaatgggttctaatgagtaggaatcactaagatcatttggtggattttgaacaaaacttatactgttggtggattcaggaggcatgggagtattgatttgtgttttattttcatgtctatatatcttgtacacatgtacatttttttcatgtgtatgtataagcagtgtatcgaacaaaaattgatttttttcatgtgggctagagtcagaatgtttaaaaagcatattgaaggaattgagagcagtgcctctttcccaaatcattgtgatatttattataatcccattcttaataaagcaaccaatgtgttctagttaactttgcctgtaacctaacaccacctagagccgtcttagaatggaatttcaaatgaggaatttcccaggtcaggtaggcttgtgggcatgtgtgttggggatgtctttttgtcaactgttgtaggatggcccagcccactttgggtgccaccattccccagacagatagcactgtactatacaagaaagctagctaagcatgaccctataagcaagccagctaccaagcagcttcatctatggtttctgctattcttccttggctgagaatgagttgtttgattgaaataatcttgtgtgggatagcaagcagatttgggcttcaagttcctgcttgagttcttgtcctgactaccctcaatgatagacctgtgaactaaaatagcccctccctcccctgagttacatttgatcatgtgctcatcacagcaacagaatgggcatgttttttattatgtacattatccaatgactatacattgtcccccatgctcattagttaccatggaagactgcagagatgaatcagaggtttagagcacacactgctcttgcccaagactggagttcagctcatttgtacagacatcagagggcacacaactgccttcactcctgggggtctggtgccctcttctggcatcttcagacactgcacccacatgcatgtcttcctgcctttcccatatatacacattaaatttaaataaaaataaacctctttatacagttgccttaaaaacatgtagaattggattttaaaagaatctagcaagaaagtaagagaaatagaagtgcacatctgttgtgtagatgtttcttcaagatacatgtgacctttgccatcttaagtcagagcaagctgggcagagtcactagagttacaaagctctagagacccctccacttcctaagattcacgattgctgtgaggaaaggagtctttctcaatggtgtagtcatttgtaaatttctctgtattcatagtcatatttgtaagtaacgccagtaaactcactggttcacttagctcaacttgggtagaagtttttctttcatttttccttgtcctttctatgtggatgaatataagtaaactgccaaggaacattcttgtaaacttcttaggaacttctcactatcctaagtacatgttaatctagtgatggtctggtagagccatgtctataatcaaagaatagtgttgttattgtggggaataaagtaagctaatgctttaaaattcaaaatgcaaagcatgtagtaggcaaaatgaatacaaagtagaaggtaagttatcccccattgggaaacttaacatctaatgaaaatcgtgggccatggtggcatatgtttttaatcagcaatccggagacagcggcaggtagatctctgtgagtctgaggccagcctcgtctacaaagtgacttccaggacatccaggactgttacacagaaaacccctgtcttgaaaaacaaaaaaacaaagaaaaaaaaacaccattaattacaaagatgtgtgtgctgctgtttggtcagagggaaatgatagaatgctgtctgaatccttagatagggcatctgtgtaactctaagaatgtatctatttttatccaaacactattctttgtaaaggtgtaggggactccataaccacacctgtagccagccccgaacaggtgtggctatggtgggatctcatagatggttatgagccaccatgtgttactgggaattgaactcaggacctctggatgagcagtcactgctcttaacctctgagccatctctccaaccccaaataatagtgaattaccaatacggagtcaggtaaagatattagggtatttatttaggagatgccatacttaacagtgagcaacctagccagctggcagggaacggagtaaatagagcaagctgaagatgaaaaggaagaaggggctcccatgtacgcgcccctcagtcttaaattttccccacatcaccctgaccacgcccttgaaggtgtggtcagacacacctgtagccagccccaagcaggtgtggttatggtgtcccctacataaggggaaaaaggttttaacccaaggaaggatttattcatgtcagtttatttatgaatacctattaatttttcatctgtaattttataagatgtggtcgctgatatctttagtacaagaacattttgagctttatattcaacagtccagcccctgtaggtatatatttatgacacaaatggctgagtaaggtcaagagtggcattttcctctgaccactgaggtcctagtgaactgacttggttctctttccagttactaaatgaggtgaccattggagggctttcatgtgatgtcaatgcatagcattagcaggttgaagttgggttatgtttacaaatgcaagaataacaaaaacaagcaagtacctcgtcctgctttggggacagttactgcatttagagcctgatctatagtaatgacattcccacttgcattcttgttagctcttcagaatacgaaacttgaatcaccacagatgcttagaatatgtgttcatttctgtatttattggattataatgcccatttgctgtgaaatatagcataatccctcacttacaaaaactctcaacaaccagaaaattcaaatactccaaattggttttactgtaatggatattaatgattctaaagaccaggaaaaccaacaaattccatagccatctaaactataaaataatatctcatttgtattcattaattcattctttaaagactggttacttatccatataacttgtacaaggcaaacagcagtaatttaaatactcaaattagaagaacaactcaaatgtcagagaacctggaaagttcaaatgccttctcccgaaaccaattataatattattgagataggcaaatgtattttagggcattttctgaaatgttaaaatgctacataaatacaacataatcctattgacttttgactgttatgatgtgctctaaaaaaataatcacacgaagctgtatgttgtgatgtctgtctcctctgtcacaggggcactcctgcagaaactctagtaggttggaaaactgaggcaggtgtcctggtgtagatcccccacttaagattgccttgttgcttttaaatagtgctgtggaccttgcctttctctagctttgggtgtttgagtccacaacctgactgcatttctgttcaatttttttggcaatatttctcaggaggttcaatgaggtattttgtgcttgatcacttcacttcctgccaccttaagtcgattcagtgtcttaggaggtagaagtatagcagttttgttttggttattattattaattattattgttaattattagtgttataattaatcgatatcccagatgcagtttctcctccctcctctccccccagtcccttcccaacctccctccattaccacccctcaatccactcccctcagtttctgttcaggaaagagcatctcccatggattgatatgcatggaagcctatcagctttatatggtctcccatcaccttacgttaaatgtttagatttacagtggtccttcctgtctgtcggctatctccttgtgtttttaaatgaccactatccacttttcatctttccttccatacctagctgcatattagctgcaattcttctcttaaaaactttgactttaccaagtagaaatgtaatttacagttctgtctcaaactattccatcgagacaggaaggcaggcacctgatctacccctttccactgattatacctgaacgccaaataattggtgccttacttctgtcttggtgacaagtgaggtctttaaattttacttttttttgcaaatttcatatcattaggaattcatggatttttacaagtgtattttcaatgtattcagtaattttctggttgaagctccctcgggttggtttgttgcttcctcttgacatgactcattagttgctttctgggtaatttaaatgcagcagtaatttaaatgctcgaattataagaaccacccaaatgtcagagaatctggaaaattcaaatgccgccaattaaaaccaattatactattattgagataggcaaatgtatctaaagcattttctgaatgttaaaatgttatttgaatatagcataccctttgtacttatgtattcaaggattgtaaatatggcaataattaatgtcaatagtgatgaactattgctttctgaggaacaagatgatccagattcttcatgagctattcctcccatggtcctaaaccagtcatttctcaaggaacccaggttgcttctattcagcaatgttgcaatggagcctttttatttctaagcttttgagtgtataatacttaacacaagatgctgtctctagccttgccccattccaacctttttccaagatggcaactcactaagttagcaatgattcttgtgattatgttagaaaatttttccatcagtcattttaggttggtactctaactaccttaagggataccttatttcaagagagcttggctaatgacaacacttaactaaacatttttcaggtaccaataccatgtcctatatagactgtgttttcttaagatattaaatctacaaaaagaaaaaaacgattccttgtttggggcaggggaggggggagttaagacagggtttcactgtgtaaccctgtctgtcctggaactcactctgtagctcagttggcctcaaactcacagagatcctctagtctctgcctacagagtgctaggattaaaggcatgtgccatcgctgcccagctgggttctgttttttagttaatgtggagttagcttgcattagtaattgctttcccatctttggtttttatgagactctatcagggattatattaaccacttgtatttctgctgtgacaaaatgcttgacagaagtagcttaagtggcttgcgcgtctatgaaacacaggtcaaagagacagtagggaaagaatggcagcaggaaaaagaggctcctggccacagtgaatctacacttaggaaaacatctaatacctgagctcagcttgctctccctttttattcaagccagtgtcacaatccatggagcaagactccctatattaggttggatcatcctccccaatagcccttatatacacccctagaagcttgatgctgtggggatcctaaattttatcagctcgacaatcaagatgaactatagcacatgcatatatgacagtatttagattcaccgaagcagcttgtccctcagagcctgctgaggtaaaggcttcgccatatcctgttactttggctttcatttcctcctgtctttgctgaagtctttctctgtctttttagggagtttcatggtcccttccctttggtgggacacttttattggataggaagttacagcagttaggttattgctatagaattctctgagagtgacaaagagctcctgtcttctcaccctcttgtcaaactctatctctgtctctgtctctgtctctctctgtctctctctgtttctgtctctctctctctctctctctctctctctctctctctcacacacacacacacacacacacacacacacacacacacacacacacacagtgaggaaaatgcatcactttaaaaagtggcaccactggctcaattgtaggaaaagcaaaagaaactgcttctgttttccctctgaaagctgacatacaaaactcaagtgtttgacgcttcatcccttgatctttattaactaaaatatttatttctaggagacagatagatagatggttgatagacagacagatagatatgtttcctctctttctgtgtgtgtgaggatgttcatgtgaatatttgagtgggtgtgcacatatgtgcacatgcatgtgaaagccagaggtaaccacaggtgtcattgtttagaagctagctaccttttcagtctttcacccagctgtgggactcactgattaggtaggtaggcaggccagtgaattccagctgtctacctgttcagtgatgacaaatgcacactactttttttcctccattttttatttgaattagaaacaagattgttttacatgtcaatcccagttccctctccctctcctcctcccctgcccacccccaactaacaacctaccataccatttctgctccccatggagggtgaggccttccatagtggggtcttcagagtctgtcatatcctttgggatagggcctaggcccacccccttttgtctaggctcagggagtatccctctatgtggaatgggctcccaaagtccattcctacgctagggataagtacagatctaccactagaggccccatagatttccaaggtctcctcactgacacccaagttcatggggtctggatcagtcccaagctggttttccagctatcagtctggggaccaagatctctcccttgttcaggtcagctgtttctgtgggtttcaccagcctggtcttgacccctttgctcaccactcctccttctctgcaactggattccagttcagttcagtgtttaactgttggtgtctgcttctacttccaccagctgctggatgaaggctctaggatggcatataagttagtcatcaatctcattatcagggaagggcatataagggcatatgttgcttagattgtttgttggtgtcatctttgaagatctccagacatttccctagtgcctgatttctcttgaagtctatgatgtctccctctattttagtatctcttatcttgctgtcctctattcttcccccaactcaaccttcctgctccttcatgtcctcctcacctgaacactactttttaaataggcagtggggattgaactcaggtcctcatgtttgcatggcaagcattttattgactgaattttctccccagtttccttctgaaatagcttaaatatgtacagataagagataagtcttcattgctaaaaacaagcagtggaaccacttatccccagatcctgtggagattccaaaacagctaagataaaatgattacttctttttaatatatatatatatatatatatatatatatatatatatatatatatcaaagctgcaaattgggttgttgacatccctctaaatccttcatatgtattgaagaattacttttctactctagatatatctaatgcctaacactacttatttgaagatttatggtaatgtttaaaatagattaatcaagaattaacaaatacctgctttaaaggttgttgctactttatatttttcaacagaactttcaaacagttccataaaatatacaaaagaaaaccaacctctctctgagtctcaccaccaaataactaaatctctacataaaggttgaaggtcttctatctagaaatagaatttcttgcttttaaaaggttatccactgctctgtaatgtgtgtgagaggccactgtccacattcttatctgcatgaataactggagctcctagagaaaaacaatccaatcagcttccatctaaaatagacatgttctaccattttgttccttctccacattcccatggcaacaggatgattatgccaatgaggaagggggaaagatgactgctgttaaagtataatgatcataggactaaatacttaggattagaaagtacttaaaattaataggattaattttgagctaagtaatagacagaaaattaaatatgtgctattaatattaatagtgatattaatattaatagcaataatgatcagatagctattgctctgttaaagtttgcagttatttggtctttgtctctgtgcctttaaaatataaaacttactattgaaacatttaattaatgaaactcattattggaaaaaagtgaattacatagctatcagtgctaataaatgagaaaaaacattatcctatatctactgataattttatggcatcaaattatattcaggtaatgatatttttcatttttaaagtggaaatacgacagtaccaactatccgggaagtgtcagacatgtgatggaggcaataaaatgaaatattttactgtatgagtcaattaatgtgaaataattatcagggtatcctgggggttccttcaggggacacttattataataaattgcagctggtctcatctgcttcaaagtgaacttatgtaaagcaccaatttaacaatttgtttaaatgaatgagaaatattctgctagaattaatgtttagatagctttgtggtgaccagaaagtagattatactaaaggtatttttgacctaataactattatcaatggcacaaaatgagaaaaagacagacattgtaacatgcatcaatattaccagcactgcagatgatgaggcaggaggattgtgaatgagtctgaggccatcttggcttatacagagagcctgtctctcaaattgagaagaggaaatggagggaaggaaagagagacataaacagagagacagaggaatgaagggaagtgagaagaaaagggagaaagaaacagagaggtaaagggagggagggaaggaacatacaaataaatgatggaataaaggagagaaatataaaatgcatttcttgctcaaatgacttagagtttatttaatgcctctcatgacttttgctggctttgtttccttttaccccccaactccatggataagatttaatctttttattttatttgaaaaacacctaccaccaaatgaaggcattatgtttgaccatggctacacattttacaggtttatcaaactgagttgtaaacatgaaatatcccttagtattgttgtttttactatcctttactatcactgtgagctaaatctattctcttagtagcagaattgaaaacgttgggtgttcactcaagtatctgcagttctcaatcttctttgcaatttctttctgcaaatgttattaaggtgtagttggtttgggctgggtttacttgtattgttgtctctctctctctctctctctctctctctctctctctctctctctctctctctctctctctctgttctgtggtactcccatctcagtttcccaagtactggatttacaggcatgaaccatcatgaagtcttctttttcctcaaaggtattcttaaaagcctgccacttatggttgtcacctttctacacggagctaaatcttctaaattattttaattttgttatattttgttgataactcagaaataatagctcacaaatcaagctcattcttattggctcctaattgtagaatgtctgaatgatagccagtttttacatgtaatttgcttttagttgattatagattaagtagttaaatttaatgaattaattgccattgtgagatcatctaaaattaaaaactgacagccactcagatattcgttaatagtgtagatttttcacacatatatactaggtatggcagggaaaagttcatcctcattctcatggttcaggtaaaaactgaagagaaaatgaaaatttaccttaattgtgatgtatgaaaactctggttcaatatatgaaaaaagtaaacttgtgatcatgtttgaatcttgctttttaacatcttagttgcctgaaggaggtttttggcaaatctgtaatccaaaacaaaggtcttattccctgggaagtatcacaaacatatgaggagaaaagtttgcataaaatgaagagttagacaggaaattaattaaaatatggattcgaaaaccaaggtgcatcagattgcatggaagtcatctgaaatccacatatttaccagcaaggaaaggtattcattttgttttgatagaagcaggagtttgggggttgtctaaagagactctagggcatgcattagctggtgaattagaggttgacttactaagacagaattatacttcagcagaggtagagctgaaacactgggatcctgggtagacagactctatgaggaataagctactgtaatagaaataaagcgcctatatatgagatcttcaaaatacattaagtgattcaatatttaaaacctctttgaaataattatgaaaatatgattttgcataactagctgattgatgttaatcaaactatacaccatacctatagactatggcatttgtaaaactgcatctctaagtatataataatattagccaatagtaattttagagaataaaaacaatagcaaggacagaaagcaaatatcatgcatgtgcttagtttgtgctatctcacaactttgttaggagtgcattttcataatgtctattttattggtaaggaattgagcacaaataactcacctgcacagctggcaactgaagccatttttgttaagtgtctaagagtgataggtaattcatcacaaaattaagtcatttaattctgatcaagaattggggcacttcttgtacttctcccagcatcaacagggaaatggtttctggacatttgtttcattacctctgggtgccctgcagaacatcagacagaattttagagggcagtttggaggaatttctttcaattagcatgtattttatttttcttttatgtaaattttaaacaagatgatagaggtaggacaaaattatttagctgtctttaaaacagccctttttgtagtgtgcagatggaaatctttatacacacaggaatttgtcatatgcaaatgctttcaggtataccaaaagcttagaatttaccaagacagcactaatcagcttaccaattacattaatatttaaacaattttgttttgcaagtagagtgatgaataggaaaagaatgcaggtgtttcctttgtggatgtgtgggcattaccccaagggtcgagaaggacacttgactgtagaagtaagagcaacatcagttaggtgagcttgctttctgatccttgcatggttaagagagcaaattacacagtatgtgaatagcaagtcagcagggaaagcctgtgaatggagctagtccagagtccttcccgctgcttctccaataaagttgacacccctgaagcaaaaaatgagctgtttactgtttggggttttattgttgagagcaaaaccatgctgtttttcctccctgtgtagaattgaaagatctgatcatgccatcttctcttcaggtgaacagtttccagaaatcatttcagaagtatcaaaaccatgctacaatacacacatcccttgccctgaacattttagccattcacctcccacatctttaaaatgagtggttttcttacatatgatgcttttcttcttaaatatgatagttttccccaaaaactttcactagaaaatcccaaattatgaagtgaaagattgctcgtgaaattccttgacattttacagataggtttagctggacacagacattttttcagatttcttagtaaagttgtgtatttgggattaagcagccttcatgtttctaagatgagcctctgctcatgagttaatctataggggtgcaaaagaactggagcccttccctgtaacatggaaaataaaatcccagagatagatattggagttcaagctgatggtcagataagcaaagcagccggccactatctcttacctatgcctcttcctagctccatgaatcctcagagtgcaatgctctctccacaaatcctcagagacaatagctctccctgtttggaaacagaatctccacatgagaccctttgcctccttttaaacctctctaggcccagccatatcactcctgtctccacctccctagtcctgggattaaaggcatgtgaccccaagtgctgagatcacctttgtgtgagatgtttctcttttagactggatcaattttgtatagctcatcagtgtgatcttgaactaacagagatctgtctgcctgtctcctgagtcctgggataaagccactattgcctggatctgtggcctgctaatatggctgctgggattaaaggtgtgtatcaccactacccaatatctatagtttgtggctggctgtgcaatctgaaccctcaggcatgctttaataaaccataaataatacatcactacattccccttacacctgtgaagcatgcattcctccctagcatgagggaacttcaaccatagcctggattaaaaataagtagacataccagctaaggacaagattctacctaatggatatatcactcattgtttcaaagtatgttttgatataatcaagataaaattaacagaagagcttcacggacccatgtcattgtgtcctctgatggcgatagatacagtttcatcaggcaagagaaaaacctgcaagtacgagctgccacctgaacttgaaatggccacatcatcaagccacacattaattgtggttgttttccaggataaacacaggcactatgtggttaacccatttgaaaacctttaagacctccaatatcaggtgggcacactgtgtcagtgtattaaactcacagagttttggaggtctaagcgagaactccaatgtgggctctgtcactgtgcagacaaagaggcccaagtggcatggactcagctgctagaaactcaactagtacgacttttgcatattactacatgtgtgcatgaaatacagaactactgccaacacttatcagtgaaatgtaccttggaatgcttaatgaagatttctggtctctggggtacctaaggttcagctgggagcactgaggcaggtgatttacaacctgctgcacagactagagtttcagatttcatgtctatcccctgggagctcacaacccacacggtttcatcactcatgccagatcatccttgagtttgattctattcacataactctgatggaacacaaacacaatgttttaaatattcaaattgtttagcatatttcatcaaatgtctcgtgtctccgttactttgtcattttccagatagatacacattaaaacttgaacatctgtagtacacaattttgatataataaatttgaaaattgcatctcttaagggtataattacttgctttaattgccttgcaacttgataaatatttgcaccacggaaagaagttatttgtttgagaacttcatttatgactgatatatacatagttttatgactgaacactccaaaagtaagtcaaagaaattgtgttataatgacacacagtgtattagttgaatagaaaggaaaaataattttgtagtgactgataactaatctaggaaagtagagacaatggatggacacaaccaaaaaaaaatacatgataatttaaatgataatagaagtggttttgctattgtgttcacatcccatagtctacataacaaatcacaacaggcaggctggtttaagagaaatctgttctctcccagatgaaagcccagagataatgaatactatttggccaaattcccaaccagaccacactcctgcttctagaagaatccactgctttcctcctctgaattctgatgacttctggctttccttggtttgtggctgcttctgtctagtctttggctctgtcttcacttgcttttcttggtgcgtgtgtgcataccatgccctttacttcacctttttaagggcactcaagatagtacttaggattcactaggacaattcaccataacaccctcatcactaagtttgtaacttaagccacagctgctagaggtttagcttattgttagatggaatatgcacttatgatacagaaaacactggatttgatccccaaatttgtgataatagcagtaaataaataaataaataaataaacttccaagatactttttttccaaataagttaactatgtatgtggtgagtaacctatcaaagaagtgttaactggttaattaacccagaaagtcatggcccttttccctttcatgctatatacaatggtgtcctgaacaaatctaaagtgattcttgatggagaatggggttggtttccagccatatttggtcttttttttctttttattaactctgagtgcttcttccaatatttccttctttggctcaatacaaggtagctatcttgttccataaagttttcaagtatctatcccaacaccacagactgacattttgggttttataggatacttactacatctatcattttctgagtagtgtagaatggaaattctctttaacctcttagaggaaaaaggtaactagaaattgtctggttttagagtttccattgctgtgataaaacgtcaataccaaaaacaagttggaggggaagagtcttatttcaacttatagtttgtgatcagtttatcattgaaggatgtcgtcagggcaggaacctggaggcaggagctgatgcagagaccatggagggatgctgcttactggcttgctcgtggatttctcagcctgcctttttatagaacccaggaccataagcccagggtcggcactatccacagtgatctgagtcctgccacataaatcatcaatgaagaaagtgcagctcaagcttgcccacataccaaaataatgggagcattttcccagttgaggatctcttctccagaacaactctgatttgtgtcaagttgacgtaaaagtagcttgtacaactctacctctcaaaaactcaacttgcctgtcactcaaagtctatacctgctacaccctgtaaatagaccatctgtacttgatggcgtgaagtagaaaattccaaaggccctgaggcaggcatgtactatatgtagtctttctgtatttgttttaattagtgctcagtgattgtttgagtttcttctctacagagatctgaatgggaaaagatagccccatctatatacatcgtggttcagaattgtgagtgctataaaaaagggttatgaaacatcccactgctctaagtgtcactccatgttcccagggaagtcgcacctctctccaaataaatattacctgacacccacaggtggagtgagaaacctgcctgcatctgtttaaaggataatttggatttatgaagacatgaaaaagggaaaatacactcataaagatgggatatggtaaatccagttacagagtccctggagctgtggaccaatcacatgcagcttcacactgcctgacccagtcttcaccacacaagagagcgtggccacttccctgcttctttttaagaggtcacattggcagatcaggccagatagcccaacatcataggtgaagaggatacccgctacacaaagggaacattctttgggcctttttagaggctacagaccctggggagcaaggaagcgtcggtactgagactgaatccttctcctgtgccttattcacacactggtctttgtcaagttggtcctgtggaatgagttcactccgtttccatgatgaacttgatcatttagaagattcgaggtaggaaactaccaaatccttttcttagacttctcaagaagctgcgtaaaactcgaagatcctggattcatgagtagatcttttcatgatagttaattggagctgggccttggcagcagtggcctaaatctcagttgctctagaggtcgaatagaaatgtcacacactcaagacttgcctagtctgtagaatatgttcagggcaagcctgggcaactgagtgagtcttgtctcaaaataaaaagtgaagagggcacttgcctatcgtgtcaaaggctcacagttaattgaactagaacttgatttgtgtcaagctctgaaccaatcaatccttctacttgttttttcaatttaaatttttgcatttgtctttgccttaaggatcatctttctgcagtttcatacaaggtcacttgacactccccagagaacatttctccggggaatatttctattagaaatattagagataatagaatatttctattatttaatcctttgagctagggtgtgttgttgttcttattattattattattccagagcagcaatatgagctcagagggagcaggtggcctaattggtgcctgtggggtttattgctgcattgtaaattgacaacagagtcagcttcagtctctagaatatctcattacaaggctatttcttataaacttcactttaaattggaaatatgcttgagtagctagatttcagtgtgaaaagtatcccttgttcatattccaactgcaaggtactcataataagaaaagcatcattctttttcaatacataaatatatatatgtatatttatgcttaaaaataatgggtttccttatgacatttccctagatgtcattataatttgtttgcattcatatctctcctccactgctgttccatttgcctcccctcttgctggttcccttcttttttctaaatattcacccccatactaaatatatcatattcctctctcttttttccttcttctcaactctcctttaaagaaacactgttccccttgttttaaaattgcctgcatcctcacacatttagacagccgagttcatcttcaagtcagcattatcaaatctacctctgagcaactgaagcaaatttacaactactcagagctaatactgggccacttaagcacattagtgttctccggggagtgtcaagtgaccttgtatgaaactgcagaaagatgatccttaaggcaaagacaaatgcagtagcaaattactctcaccctaaaggcacttctatattttgttcctatttggttaaaacaatattgacagggcttattcttgtaatggctttttttaaattatgattacagagtttatatattctgaataatttatgttacagatgtctgtatgtacatctctcctgatgaatctgaccacagttaaattgctagactcccagtgaaaccaagcttctctctacagcaccaatgtctgattctgttattgtgccaaggtcttcaaatagtttaccacttttttttgtttagtttggtttatttttctttgcaaatttctagtagtaaaaaaatgtgcttgagaaagagacaaaacatgaattcagacttttttttccaactacactgttgttttaagaaaagccccaagagtagctcagtctgtattgctgtcagactagcacaagtatccaagttctacctccagaacttatttttctaacttgtttttgtatttatggatgttttggttgcctgtatgtctatgcaccgtgtgtgtgcagtggctatggaggcaaaaagaaggcattagatcccttgtgagctgctatgtgggtgctgggaatggaacctgggtcctctggaagaacaaccagtaccctcaatgcctgagccagttccaagaacttgggctccagtccaagaaccactatcatatcagtactagtgtggtagacacagatggatccctcgggctccctgactaacccatctatcctgcttatcaagttctagtaagagagccaacttcagaaaacagggtgaagaatgcctaaagagctatgcacaaggttgatctctgacccccatgctcatgtacacacaggtacacacctctgagtacacccaaagagttacgcacaaggttgacctctgacctccatgttcatgtgtacacatgcccctgagtacccagatgtgcacttatatgtgcatgctcacacacctacatgcatgcatacacacacacacacacacacacacacacacacacacacacacactgagagagagagagagagagagagagagagagagagagaaagaaagagagagagagagttttactggcagtgcagatggagtaatacaggaacaggggttcataggactattgtgtgtgtgtatgtcttctcttttaggtactaagatggaactgtgtgcctcaagtatgctaggcaagtgctctatgctgagctgcatcccacacacatatgccctgcaggcccaccaaattctgttgtagcacagtggcagctgcagacaatgcttgaacaattgagaaaagcagctgtgtttaataaaactttattgatggggccccaaacttggattttatagaatcttcaaatgctacagagcattacctccccgctttgtatttaaagatgtaatagctgttcttagcttattgaccacaccaaacaggctcagcgtgcctcatcctgtactttactcaccttacccccagaatattatagacctcattaagttaatatgaaaaataatagatccagttttccaaggaattgctcagccagtggagaaaagaggaacaagaataataaggggttttggaatctttttcacagttaagattttggtcttggccaatagtttttagaatttataattttatacaggtcaagtttattgaaaattaaaatctagattttttcctcaaacctacttctctcctaatctggtttcattgatggcagggacaccttttctctttccttccccctcatctcaagcccatcaccagttatatacttatgtgacccatatgataccctgtccctgttcctctcttttcttcaacaatgcattttctccagattagatatatgatgatgtcacacataccaagtaagataatgtcctacatactaactgtgttcttgggcaagttaacccaaaccattcagactcaactcctcatctgtgaatgggaaaagcaagcatcttcactttgtgtgttgaggttaagcacttgctatgagccctcatgaccttcatgctccagcttctcaagtacctcagcctttcacgtgtcagaatcacagatgtgcaccaacacatctggagaatgcattcttctgtccatttaggctaaaacacagtatgaagtagcttcttagtctggcctgtatgaagtacagaggaataaaaagtcttggtagttgttctcaagaagtttatgacgtgattgcgttagttttctcttaaaagcatacatcaaaatactaccaataacaatgtgttttttcccacaagtattatctgagtctttctattaaaacattgtctaactgttgccatctcttatccaaaattaacatgtgtagaatacatgccagctactatacaaagaatgaaattctatttggtcatccaaatcatttactggaattctctttcaatactcgtgtgagctgtcttggaaaggctgtgcagtgttatgttctggttcacttctatttagaccacagtctccattaggatacatactggcctcaatgcactggaaagtcttatgcaggacaccttccaagtccagggaatgttcagacacatttaaagggttggattatttgctacttgttcaagtaggcacatttctgttcacaaatgagtttggcctggatacctgaaagatggttctttttcaggttcctatctcttcccacttccagtggttgttttgatcacccactgtttaattacaggatgcatctgtaagctcaaccgtcacttggttacttatttccatttaaaatgtgtacttacacatagaaattgcttctatcaaaagtgtggtagcaagtgatgctgggtcagccacggagcttgaagagaatgggtttattcagatatggccagtcttccactaaattatcttcattctaaatgcaatattaatcaaacttttgaaattaagtagtttaaaagcacccaaagatatatacacagctgtcatttaaagaaaaggaaagcattccaataattgattagtgaagaaagataaaaataataactaaaggtctgtaaattggaagatataagacaatttcatggaccatgtctgccagcaactgagctctgtgctgctttacgcctctggacaatgtatctgtggccaaaacaccttttttagagagtagaaatgtcttctataaatcttttatttctaaaactccgagttgcttactattttggtaagtactgacagagtatttcaacctgaattaactcttgtttctggggacatatttgatagtgtatctaccacaacacaccaccaccataccacaccaccagcacaccacactaccacaccaccgtcaccacgtcaccatcaacacgccgccatcaccacaccaccatcaccacacttccgccacaccacaccacaatataccaccacagcaccttcagaccaccacaccactgtcgccacaccactgtcaccacaccgccatcaccacaccacaatataccaccacagcatcagaccaccacaccactgtcaccacgtcaccatcaacactgcagtcaccacactgccatcagcacactgccatcagcacactgccaccacagcacaacaacaccacataaatttttatcactattcagggagaggtatagatgtgtgtacttagagcaaatatattctcaaataacttgatattaattattttcactgtaatcaggtactttcaacacacaaagaaaggggaaattacacctagaagctttacccgggaagcttaactggcatttaatgacaatgcaaaagaattaacaatgatgtatgcttttcaaatgtatcaaaagttatcaaatatttccccctgttgatgtttgctggaaattgcatctttcattgtaatgaaatgaatttctttacaaatagagtcagtgggaaatattgctacatcacagagatgctcaaggtagagaaaacctttatagtcagttggcatgtagaagggtcttctgtcataacttcaatgcagttataaaatcatatatgcacccagttcatatacaaacctaagaactgatcattggagagaaatatttttctcattgaacataggggaagaaggagtgaggaggtgtccagggaatccaggaatcaaggtgtaagttcacactgccatcttgcccctacagtgaaattctcaatgcaggaatgaaacaaggacacaaacttaattctgagagacaggaagaagagcagaccatgtagagagcagtagcaacttaaattgttgtttttagggttcatgcaatggacatgtaggtaaaggttatctgactcactgtatttaaatagtcttaacctctcagcaccctgactgaagaaacacatgctacagcaagcacagtaaggtgacaacataatgtcagaagactattagatgcatgatataattaaagccaagttctgttccaaatatttataaatatcactctctgagaattttaaatggaaaacaaatacatgcgcaacacatgtacaaaaatacctttttagaaagtcaagtttatatatttcaaattctgatgaacatccaaaatatggaataaacttgctatttttcggcttggcaatccacaatcctcattcatggatccactccaatatgccaggcattctgctagcaattgagacactaaactgaattgcatacccctttccagctcccagagttcccatcgtatatagggtaatggatacatcaacaccccatatcctgacaccccaaagcacagcagcagagaggaaataagagttatacctgggagaaaagaagtgagcagtgagttaaagatggaccttagctatttgtctttgctgttctcttctgcaacaaaacccatagtaacatgaatttgcatcagggtagagaccagagcatgtcagagggatagagattcataaactgaagtcactagtttttaccagtcttcaatttctataccaacaagatagaaaacaggcacacatgcatgtacacctcctttagaatttagaccaagattaaataagaacattgtacaaataacccttttttacagtagccaatgcacagtaagtacacttttatttaatattagaaactatctttatttatatatcaatgatagctaaaattgcatacagaagatatttaggaattgctaagaattcatattagatgaaagcataaagtttgagtagagaagctagattgcacagttcctcaatgccccagagttccaattcaatgcaaatgcctctaggcaatcaatttaattcactgtgtgttttagaaaagttaatataaataataggaagacagtatgagttaggtgacaagtcaggagatcctacatggaggcaataatttctgctatgatatatatgtatatattccttttaatatgtattttaagaatatttgcattaatgtttatgattttgtgtcataaacacaaatgtaaaattttatttctggaaaagcaattttgaagctgctactcaacgtattctgaatttcattctaaatatgaagcttatgtgtagttgactctcctgctgcatcctatgctaagtgagggatacaggcatttagacagttacagtagcatcctatgctaagtgggggatacaggcatttagacagttacagtagcatcctatgctaagtgggggatacaggcatttagatagttacagtagcatcctatgctaagtgggagatacaggcatttagagaattaaagtagtatgagcatgaagcagttgtcttctttcctccatcgatttcaaagtttctctcttcatcacaggaaaatagcttgatacctattggtagtagtcatacattcatgttttttagatgaaaataatttccttattcaattttgaaattatgtatttcagtggataaccttaaaatacaaaagatatacgagaggagaacgaatatattaaattcatttccatagcaggggcaagtaggaagataactttgaagttggatcttactcataatatcatcccccaaaacacatggatgacagggcaggtactgaatactcacatatctaaaggtgcaaatgtaatatctgattggacgtcttcaggatggttaaaattacataaggctcaacattgaggcaaaccttgtgcttttgttccctctagtggtggtttttggaaagttggctgtaaatgtagcagaccaagaaagtagcataagcaataagcaaacactgtccccaggaccccaagattatgttcttctcttacccggtataactgaaggaagtaaaaggcaatggactttgggaatttctacaaagagcttctaagaatgcaaaagatttggagtttagacggttgtgctgatcattatggaatgggctagttcacatacttctctaccgcagggttaccaggtgtagaaagtaaagcttcaatttccatttcattaagttatattattcctgggcagatggagccaaatctcagcttcattcatcaggctcctgtatgtagagttaaaaaacatacaatctttccaccgatttccctgaggatttggtgaagtaggagtttcattgcaaacatattaaccatggttgtatactccatggtcacttattctctttattttgaccagtgtgtttctctataatggtcttcatctccttcaaaaagaacggtggtgatatcttgcatatacaactaaaggctgtctgaaggtcagagaatggagcttgtcagggaccaagcaagacagaacctctgacttcaaacatcctttagtgatgtagggtaacatttatactcccctacggctataaggataagacacatgttactggtgtcctctagatgtgacaggaaaactgcactcatgaaacctcaacaatgtgaatgcctacataaaatctatagaatagcaatgccagttggcatgccagtatggatgggtaaagatctcacccctagatgaagagctacaggcagttgacagctgctgagatgagaataatacatttttctcagggatgagctcacagaaggactgccaaattccaagtgatttgccatgaacacttctgcaaagggacttagcaggttgtatatgcatatatgtatgtatacatgtatatatgcatgtatgtatacttacatgtatcaaaaaatcaaataagaagtcatgaattgtggaagaaataggggacatggaaggatttggaaggggagaaggagggacaagagtcacacagcaatcatgtatggaattctcaaaagaattaaaattttgaaaacccacacataactaccagaataacagagaaacaatttcacatggatttgcaagttcccagaagctagttgcacagacagcattaagagctagagttacatacatagggtttccaaattaataaaaaaaaatacttgtttactgaaactcaagtcaccccttttctcatcagtacctttcaaaattacaatcaccaggaactggatatggttgccagagccaattcagcagagtacctcaaacagatggttttatttccgtgtttctgggatttaacatatgttgggtgctatatcctctgtggcccttagtagaaagtgaacacctagtcttttatgtgaatataagtatttttttcttggccacactttaatcctgttttaggaattaagtagactgaaatcttcctgaattttccaaatagtctgtctaaacagaaactatacacacctgctcacatgcctctccaatctgttaggcttttcacacgtgaaggtccctttcatgaggcaggcagatccttttaatgcctgagttcagatgccactctggagagaatgtaagagcctgagatcatgtttctcttgtcgagagagagcactctataaacggcagcctgtgtgccactgcatttcctgtgctccatgttgatgatgtagaaaaacagctgcggtgtgggaaccacgcagagctctgattctcaaaccacaggtcatggaagggtggttatgtaggctcgacttccctttcttctaaaatagcgcccagggctcctctgatgggcctccttccaccaccaccaccaggtcatgagccaactgaagagtgagttgatccttcttcctgtggccgtatttatttttaattggtcaggaaggtatgcatatcctgggagaggctcacagcctctcaaaagatctactgggaatggctcaggaaaaaatataaaataataaatatatagatagaataagaagtttttacatcacccccaaaaaatggtagctcaacagaggcaaaaaaaaaatcagtagcttcgtggaggcatgctgacttatgcacaagttgctgggatctaataaaaaaagggtgcatatgtgtgtattaaatattaaatatatattatatgtgtatatatattaaatgaatacttagctggtttacatcaaataaatcccatagttgaagaactatatacaagaaatcagtgaggattttgtgtatttttaaaatttaattaaaatacaattacatcgttttcccctccctctcctccaccctgccctttctcctctcccattgtctcccaaattcacagccccccttcctcttaaccattgttgttacatatacacataaataaataagtatcgaaatgcagcctcttcaatctgttcagtatcgaaatgcagcctcttaaatctgttcagtgttgctgcatatatatttcaagggctgaccacagaactaaataaccagtcagggggccaatccctgggggagcctaattctccctctctgggcagttgctgactactttagctttgcatctggctgtgaagccctgtgagatttccatttatgttgggatgtcaaatgattgtagaattgttcagaactttttcaggcaaccatgttgctgagaaattgtgggtttagctttgctaaacaatacaatacaataggcttcctggtcctctggttctttccatttttctgtcacctcttcagcattattccccgagtgacaggtgtaggagttgtgttgtagatgcattcacgggggctgcacacccatgggcagttgttctttgcattttgaccagttgtggctttctgttgtgatctgtatctgtgataagaagaagcttctctcatggggtgtgatctgagatgtaagaataactatttgaagcctcagtgctggcctacacctttaatcccagcactcgggaggcagagaggcaggtggatctctgtgagttcgagactagcctggtctacagagctagttccaggacagcctccaaagctacacagaaaaaccctgcctcaaaaaaccaaaagtaaaataaaataaaatatttgagtgtagttaggaattgaactgttttaggaaagtggtgatagattacccactaagattcatgatctccatacaccatatttctatactatctccaaatgctatatatgcagatttaaacttattcagtatggtacagtagacacaagaagcaatgttaacctctatttgtattaactcaaaagcctgagttataaatgacacaaagaactaacaatctgctgcctattgtactacgtaggagaaaatggaaatggtgtccattggtggcttgaaacaacagatgcgaagctctatgtggaggattgacagtgtagacaccatcccaaagaacattttaatagcgacaacattggcaatagccgaactattggcagcccttcacatcctcctccattccatttgattctgtgtttccaatttacataaaaatgcaatcagtatttagcctttctctcattggcttctcttaggatattcaaggctttaaaaaattagaatgaagttgtttctgctaaaacaggatgaattgggaattcttcctttttttattctttaattactactcatatttacatacccatccccccattccctcaccctcccatcctcccatgttcccaaccaacccctcccaacccatcccccaactcctccccacggatagtgaggccctcctcaggggaccttcaaagtccatcatatcattcaagggaaggcctaggccctccttgctgtatctggtctgcaatagtatccctcaatagggaatggacccccaaagtccatttgtgctctagggataaacactggctccactgttagaggtcccatagactgccttggcctcctagctggcacccacattcagaaggcctggtttggttcaatgctggttccccagctttatgactagggtctccatcctctcagtaggtttggtcaactgtttctgccagtttctctagcaccatcttggctcctttgctcatctctcctccctcttcacaactggatcccaggagcatggttcagtgcttagctgtgggtgcctgtctctgcttccaacagctactggatgaaggctctaggaatggtaaccaaggtacacatcaatctcactacaggggaagggcatcaatggcattttctccacaactgccagaattcttagttggggtcatccctgtggatcccctaacattttccctgtgccagacctctctccaaacctgtactgtctccctctatcaagacatctcctttcttgccctcctctcttcctcccgtctcagtcctcttgttctcctctccctccccttcttcccttcccacctccttcctctcctcccccaccatgctcccactttgctcaggtgttcttgtccctctccccttcttcgagggactatgcaatcttctcttggggtcctccttaccaactggcacctatgagaaaggctgttctttcatatgaatggaaatgacaaccacagtgccatggagaagcagagaatccaagaaattctcaaaaaaaaaaaaaaaaaaaaaaggagaaattactgaatgttggtaggatttgatttggcttttcttttctttttaattcctgtcaaattttatctgatttgttcctggcagaatgcaaaggtacaaaattgtgtaaattgttgtaatgcagaaatttgagacccatggtggagggatggcccagtgggtaaatgcacttgtcacacagacctggcagcctgaattcaaagcctggaacacacataaaattagaaagaaataaccagcttcatctagtggtcctctgacctccatgtgtcatgtacaggcacacacacacacacacacacacacacacacacacacacacatacacacacaaattaataataacataataacaaatgaaactttcaaaaatcaagtcacaataagggaagtagtattctcttaacctggattacttaactgaaacataccactcaaacaatttggattatttttaattttataattgttcattcaatactcttgcaaatatatttcctgcaaaactaagtaatattctggattcttaacttaaaaatagtgattaaaataccgtttaggtgaattttccttttgttcccttggaaacagttaatgagtgaaagtaccagtaccacccctcagaggcttccataaaataagagtctagtcttcgttaatcatttaaatcgagtaaccaaaacatagtttactgttaataatttttccttgaaagaggtactagagaaagatactgttatctttctgtgttcaatggaaatacaattcagctgaagttagagatagcaaataaatggcaaacacaaacagaagaaagggaagaagcctttccctctggaggactttatgtagtggtgacagaatatgtcactgttacatatacattgagtttagagtgtcatcaggctctcacacactaggatcaatagttgtcaaactcagggccttaattagctctgtgcagcacactggtgagcttacttggattagaaaaaccataggtcataaagaaacaactgagaagaataaccacttggtcaattaggaaatgtaactatgctttgttcccccttcagactgcaaactgaatgagtattcaataatcctatgactctaaggcactgataatttagcacgagaccaggcagagttgggcagaaaacatgtatttacaggaagtccttcaagcatctctttacatggtaacttctccccattaggtttttgtagcattttgccagagctgacaatatactcaactaattgcttgttcccatcaccatctaataaacagcattcttcctcgagtgcctgagatgggacttgtaaagaagggttgaataaccagaaactgttcatcctcaaactgttagttttctttttctgtttctttctttcttatttttgatcactcatattaatgtaaatgagcaaataatgcacatgtaaataatttaaataataagattataagaaataactgttttgtattctctctctctctctctctctctctctctctctctctctctctctctctctctctctctcctgagcaatgctgggcatatctgtgattgtcacaccaaaaacaaatttttccaaatataatacaatatttcaagtgaaaccagttagatggaaaaaataacaagatgaatacatactcatttttctaaagtaatttaatgaattttctcagagagaaagagcattgatagttagaaggacatgtttaggtcacatatctcaaatcatattcttgtaaagtaataaacaaaacaaaatctgtcttcctggaatcccttctaataactagatttttttttcttttaagtggcagggtttttttccctcaactgaagaacaagttctagaagcctgaatgtggtgaccactatctggagtgtgggtctctaatgctgcccagccccatcctcggctggttgtttccttaaagaatcttaccctgttcttgagagaactggcctcattacagactgttacatgctccattgcagatgttacttgcacttttctcgtagctttatttagttttcttatggttccagattataactagtcaccactttccatccctgaatgaaccacattttagtcacttggacattgccctgtctcctataatctttgtttgctatgatcacaaaatcctttaatctcccaagaaaacccttaaaatgaacttgcaaaggactcaggaaggggttttctttaaaaatatatatactttgtatattgcttttgcatggtactgtgctatataagtatacattttatataagtatacattttatataagtatacattttatacaagtatacatgtaagctgatatttctcccatgcctctctccccttcccctttatatcccgatgctcttctgttatatcatattgatatgtttaactatacctacatatacaaaatctaggaactccaaatgaaagaaaaatatatttttcttcttgagattggttatctctagttgtatacattctcttacaaatgatgtaacttcattattttttctggctgaaaaaaattccattgtgtatctacatgatattttctttatccattcctctgttgttggacaccagggcgtgtccatagcctagctatcgtgagttgtgctacagtgcacaggatctgtggtgcttggagacctttgggtaaatatccaggaacagtgtagctgagtcattgggtagatctatttttaagtgttttgagaatctccaaactgatcttcatggtgattgaactagtttacattcctgtcatcagtacataagtgtcccttttgatcctcatccttgccaacatctgttgttatttatttcttaatgattgccacttaataattccacagaaatggaaatttcagtgatgttttgaagatttgcattttctgatggctagtgtggttgaacagtttttcatgtgtttgtacttgacctgttcaggtcattggcttatttattgagtagtttggttgactatgagttatttttgtatttagtttctttttaaatctattctaaaaattaactctctgtaagaagtatatccagagtttcctttgccatgcagagtatttaacttctcgaggtcctattggtccattcttggcattgtttcctgaacaactggagtaccattcacaaagttcttgcctatgcccatatctaaagcactatctctaccttttcttaagcttttcatagtttgaggtttacgttaaggtctatgatccacatgaagctagtattttacagggtgaagttaggattagttttattcttctacaagtatatactttgcttcccaaaaccatttgttgaaaaagctagggattttgtttttgcttttctttcctttcaaatctttataaaacatcaaatatccgtagctgcatgactttaaatctatgtctcctagttattcaaaagagctgtgtgtctctgtattagtaccacactgttttactgatttggactttgtagtataaactgaaatcagttttgtgatattttcacaatttccctgtttttcttttttttttaagattgttgttttgatctgggatctttttgcttcagtatgaactttaacattttttcctattttagaatatgggatccaggtgaatttgtactaaatctgtgaattgcttagtatagctatttttcaaatcattgttttctgttttcttcaacttcctcctttactgttttctttctcttcctaggctagttctttttagacaacagtgaatgggattgtttctgtaatttcttctcagtatatttgctattagtataagaggactactggtatttgtatgttaattttgtacaactttatcagatccaaaagttccccagtggagtcttcaggatcttttatggatagaacaatataatcttcaaatgactttctcctaacctatttgtatacctttcattttcttctcttgtcttatttctcaacacaaaaagaactatagagtgatctatttgatgaacttaaatacaaaaattctcaataaaatatctgcataatgaattcaagagcaaatcaaaaaaagatgatttgttataatcaaattggcctcatttcaaagatgcagggatggttcaacatatgtaagtcagtaaatacaagtcattatataaatgggctcaatgacataaatcatcatcaataaatgtgaaatagacctttgacaaaatgcaacatccttcatgaaaaaagccctgaagacattaataataaaagatatgtactttgctgggcgttggtggcacatgcctttaatcccagcacttgggagatagtgtcaggcagatctctatgagtttgaggccagccaggtctacaaattgagttccaggacaggctccaaaacaatacagaaaaaccctttctcagaaaaaaaaaaatatgtacctcgacacaataaagctatgtacaacaaacctatagccagcattacactaagtgggggcagaggaagccccaaagcatttttagtaaaactagggaaaggaaaatcattttttattcaatacagcattttatggaactttgaggggaagcaacacagcaaggaggtaaacggtagggctagaagcttctgggagtcaggggccagctaatagaaagagaataagatttttttgagtaatgagtttaaagtgaggtcagcaatggaagcctgtgagacactctgtggtgaagggatagtcttcaggggtagagtgacaatgcccagagtgtcaggggaagtgggttcaggatattgcctggggcatcagaataaaagttacagaaagagttcggacagtgggatggcctaagtgatgatctgtgagctactgaatcaaaagtagtttcttaagaacacatctcactaggagtccacttaaccacttgtctttttaacatatcttcaagtctgtcagctttcatgtgaggcaggctcttacctaggcgattgaaaggatgtttggattaactcataaggtaaggggcaaaaaccgtatttctgtaatcttataatctttggggaagtatagaatatcatgtttctacccagggcctgaggtaaaattcagatcctgttcttctgagaaaaaaaaaaatcttgtaacagaaacagattaaataaaatgaaaagaaaatttacaactctatgaagtaaccattttaggagaaaatagcattcttttttaaagttggtgttacagagagagagaagtggaatataaagctgatcctagcagaaagggcacaccctaaaatgacctgaatgtaacatgaaaaataaaatcccagagacagatgttggggtcaagataagcaaagcagccagccgctagctcttacatctacctcagactgaaagagcgatccagctagctccacaagttactacctgggaactgaatccacaggagagcctttgcttcttccttttatacctccctagtgctgggattaaatgcatgtgatcccaagtgctgagatcacctttgtgtgagctgtttctctttaggactggatcaatttcatgtagctcagtgtggcctttaactagcagaaatccatctgcctttgtctcctgagtttaaaggtgtgtgccactactgcctagctcaatggctggctagtatggctgctgggattaaatgtgtgtatcaccactgcctgacctctatggcttgtggctagctttgcattctgaaccctcaggcatgctttattaaaccataaataatatatcaccacacttgcaagcttgctaaatacctgtctagctacataacagcttgactacattttcccagtaaaagggaatcaaattattggccaagcagaattacatgaatttcttattcatattgtgcattgtgagcacaaaaaaagcctgaatctattataataattccatagcattggaattggccacgctcattattggctgttacttttataaatgccttctaaatcagatgtgaagatcctccagtgagggcagaagttccacacaagctgctatagagacaactgtttctctttaggtaccagcttcgattacatttttccccttgaaaatggtccagttgagaccatcttctgggttccatgaagtatgaagatggcttctttcagcagctgtttgctgaactctttgtcaaggagagttttccttatgggatccaattcaactcctctggcctagaagataaggcctctcatgtgctcttcttaaacacattcactttgctgctgttttgtctgatcatttatgtaaattagtgtacaacataatggacttattaaggcttgattcctactttgttcttattgacctttcttccccttttccaccaccctcccactcatcacccccccatatccaaccttctgagttcatctcagatgtatttattcttttatcctattttccttgcccctctctccaaattcttgtttaccctctcttggtctgctttctactttcccaagctatacacacacacacacacacacacacacagagagagagagagagagagagagagagagagagagagacagagagagagacagagagagagacagagagagagacagagagagagacagagagagagagagaaacagagagagagaaacagagagagaggggtgcatatataaaacttaaagcctagcatctatgtaggagaaacatgcagtatttgtctgagtttgtttatgttgacaaggatgtagtgattcatttgactcttgggaaagcctccggagtgagagctgactgaccagtaatgagttccttgtagtaaaactggtccaagatgaagtggtttggagtatagtgatgcagtggaggaaacaggaagagattggttggggatgttttggaaaagaattgattgtatttgttgatgaatgaaagaggaaggaaaaaagagtcaagaaaaagttaatgggtgaatctaaactgctcaagatgatgacattttgaagattttggaaaagttagtaggagcacccttgggtgacaggggtagggtggttctggctgaagcagaaactctgagttcagtttgagtctgtaatggaatatccacagcaatctaagaagacacaggtggcattgctctctgattgtatccctaaaatggcaaatgatcttcatgtgggaatcaatttactccatggagacaagttacaaactggagtctctctatggttgtcaatacacactttgagactctcatgatcttctcttctttaacctgagggagaattctcctcaatcaccctggcacgaaacaaaagtttggttttatttctagtcagtattttacagagtaaatactgtaaaatctacaactaatagatgcttaacaaatacaattaaggagttcatgctgaaatggtcacatgcacaactaaaagaagtgagttatcttactggttctcatgttttggttttgcctttttgcttaattgagaactataggaattattcaatttttgtgaactaatggactgattctaccgtgggaaattagattaataaacaagaaccatctaaagaggatctgtatgtcagtttgctaggactgccataactaacgattaaaatttggtttaaaaccagagaaattcatttcctcacctcactggaagcgagaagtctaaaatcaaagcatcaggaccaggtttcccctgaaggatcaaggggaaaaatttctttgaacccttctacttcttgggtttctggcaatcttggtgtcccttgtctatggatagtgaccccaatacctcttccatcttcacatggctatctttaccatcaggagctgaatcttcttaaagttttcctataaggacacaagttatggatttgaggcctaccatatccataaggatctcatcttaactaattaagaccccgattctaaggaaaatcatattctgagtatggatagattttacctctaataaagcaccagtagtgctcagataccatttagttcccagccagaactcagataatcatagcctgaggttacggctgacttgcaacctcataagcaacctcaaagcaaaactgcctggccatgactcttctggactccagacatgcagaagctcccagataaaaagtacctaaaccaggtgatagagtcattaagcattagtgtgatatttattttgctttctaggagtatgatgcctattgttaataaagactagactatggtgagattggaaaacgaaagtgagtgaagaaggactttaggaggcttagtggggactttaagaaaactgaagaagagatagaaagatttctcagtgctttcaagtgttgactgcttttccaaaagatatgagttcatgtcctagtatccagctgggaagctctcagctacctgtagtaactccagctttaggacatcagataccttcttcttgtctcctcgcccctgccccttcaaatgcacacaagcaaacatataaaaatattttttaaagaaaatatgaaatatccctggaaactatagtgaagaagccctggttattttgtagcaaggatgtcaccaagaatgacaagttaagtaaaaattagtctggtgacttgaaaaagaaatccagctagaagccattttgcaagcaatgtgcaaaggtgaagttggattttgtctcattacttaggggaaatgtggtatgagaaaaataagataaataaaggactgtcgagcagaaatgatccagtagttattttaataattttcatcctttccaaatggaaaatgatgataacattaggtgccttacaggcaaaagtcacatctaaggaactctaagggaaagacagtatccatagaaggctaacattattccattaagatcttttgttatgtcagcaataatttaagacaacgccttagagaatcattcggccagtcagtcttcacatacaggtcaggccaatcactcttcatcagtgtgcacaaggacacaaagataaagaaagtgtatgtcagaaacaatggtgagtttgtcttttggaactccagcaggattcagaataaactctaagggaaagtttctgagaggattaaattgaccaagcttcaccagcattgacaaggtggccttgagccaagaggccactggagtcccaaaagtttccaagcagaaagcagcttgagaaaactgcttcacatactgaacaattgtccacatcaaaggaggaatgacgccaggcgttggtggcgcacgcctttaatcccagcactcgggaggcagaggcaggtggatctctgtgggttcgaggccagcctgttctccagagcgagtgccaggataggctccaaagctacacagagaaaccctgtctcgaaaaaccaaaaaaaaaaaaaaaaaaaaggaggaatgactttgagggaaaggtgacaaagccaaggacagagttggaagctacaattatttctagcactttaagtcccaaatcagggataaccaagctgcttcttgctagatgtcagaacttctgtgaacgagtgagggtgcagatgtggagagtggggagtaaatgatcatgattcttgtagcttcagattgtgaagagtcatccttgaagaactgtccttgcagggatggtggctcagacccaaggtctcgggtctcagtagtagggtagatgacacagaaacgtcatacattaaggcctgatttacatgttgaaatagtctcaaaaaataaagaactgtagttacaacatcacttctgggaagtttcatctgtacctagaactgatttctataacaagggctttatagtgagtacacagagagtgaaacattcagagacactaggaagacatgaggacactccatctgtaaaaatcacatgaagatcagagactggactatagcagatggtctccagtggtccctggcgtatgggcctcctcattcatatgctttgtatagtgtcctatcacataaaatgctgtggttcatgtggccaatagaaaatactatggtgccattggtgtgtggtttccatggttaggctgtaaaggcattgtgccctctgccttattctttatgactgcttgtttcagaaggacacatatcaacatatcatgaggacacagaggtaatttacagagaagctctgatggagaattgaactgctatctagctctacctaatagctgagtaagaccccatggaacaggactctcacagatgctgtagtccctgataacatctgcaaaggcacaatggcccagctaagctttcttcaaaattatgactcacagaaaccaggatataataaatattcattattgtttcaatgcaattcattcatttggggatgactttttattgttattattattgggggcgggtttcgagacctgttgttttggaacccgtcctgggacttgctctgtaggccaggctggccttgaactcacagagatctgcctatctctatgtcccaagtgctgggattaaggtgtgcaccgctgccacaaccacccagctagggatgacttttcacattatatcaataacataaaacatctatcaaaatctgataatgttaaataaataaactacataaattttattttataaactaagtcaacagttttttttaattctactatttaatatgaggctatgattatttgtatacccccatatttcaccaaacttaatttctacatataaagcctgaaatgactttattaaaatcacttttaaaaggaaaatctagatatgagatcaagttgctaaattccattgtttcttaaatgatgaaagtattcacaagaatatttgctaacaataaaaagttaatgagtaatggaaaggatgatacttttactaaattttcatatacaaagagagtgatgatactttgaagtagacaagaccttttaaaaacccattatttattgacttccagttacaaaactgacatttataaacatcacaaatgcaaattaagataatagtctttccctgtaaattctccttagaaaacagaaggctagggaaaaaaaaatattaaaatttgatccaaacctgttttttctgacagtttccctatttcaaatcacaagaactgattttataagtgcttcgataattgaaaaaacttgagaagaagtgggccagtatttgtgaaaggggcttgtatggttagatggccgtcactttaactgtgttacatgttgggtctgtcaagagtggagatgacagggtaaaggccaagtagttgactatagaacaggcggtttcttacagacttaaacaacagtacatataaagaatgtaatgtctactacaaattatccgtccattaaatgaaagtgccagtgctcactgatactgttggcagaaaaataaactttgtgtcacacattagttaatcctgacattgcctcaccgtcatatcttcagctaccactgacctaaaatccttcctctgaataggtcagtcttttctaaccttatattgacatagtgctagtcttgctctattactgcattttactgtttagcagctcatctcccctttcttctcaaagattcttatttagtcagggaagcttctctcttcagcacttttagaatgaatggactcatctttacatccttacattccctgtggttcattatgctgtgtgcaatatgggaaagaaggttgtattagcggttctaaaacatggtgatagatggccacaagtttccattcaatgaaagaaatctgtgaatagtgtattttttcatcagaatgaattgattctgtgtagcataataagctactgccctgcaaactgacatccagagacaaactcataagccacatccacaattccctgctttactgatcccctcattggtcctaagcttagaaaatcctttgcaacacctatcaatagggaagttctaattttttcctctgactttaatccccattgctctaccaaggtaaggtaactagtgacttctaatagttgaattcacttgatgattctcatgtcttttccagtttgatcagtctgtagcttttcatacagatggccacactctcaccttgaaatctattcctcccggaacacatgttgtcttgatacttttcttgctatctctttcaaagctgaaattctctaggactcattctttgggctcatgccttttcttcatcatctctggcaatatcagattgtctactaacttttgaacctgccaaggtgctgataacttccagatttatatttccaggctacactccgttcttccagcttcagacttctagacacctccttgaaaacttcacctaggtctatcatatatatcacaaacccaaaatatcagcttccactcttgatccaaacctatttttctcatagtttccctgtttcaataactcaaactctatcctttctgccttgagcctcaaatataatatcatacattgccttttccttttgttctctcatggtcttcaagcaaatcttgctgatgctattttaaaactatatgtggaaaacaccacatttaagattactcaaaggcttgcccccatcatgctgtctttcttctgttgtctgatttctactctcttagaggcaatctcaaacgtaacttagaatgtaagaacagacaatgttatgctttctacagacttccttttgggagtcagtcaaatcccgaatgttcgagaaggcactggacaatttgcaccccttctaccaccttttccccaatctcatttctttctccctatccctgcttccactgtccttgcttctatggaaaccttgctaattatagcacacaccaggtagacacctatcctggggcaactgcagtttcaatttcttcaacccagattccacagggcttaatttctcttctccttctcagtgagtcccctggtctctgagttaagactgtagcccctgtacctgctcccacactcttaactgttatcccaaacatttaccacaattaatgcatacatttttgtttctttttctcttccatcagcatgtaagccatatgagggttgggtttttcttttctctattttgtacacatctgtgtccccagtcagtattataagaatatctagaataactgtgttttgttagtaatttaaagaacagcctgattctgctgaaagtacatcatttgaattctgttttgagcttaatattcagattactgactatccaaactaatttcaaagactttatttttctttgccttacttggttcaggttccttccctcagtctgtcaaatgccttgcagcataatagatctttataatatgtaagtctctagagtttcgttgataaattatgtaaagagcatacagtttttatggactctgtccctcacaggaaagttatgtttttatcaacgtagggataattgctgtcacccttagacaacttatttctattattaaatgtgtaggacaaaggtggtaccaaccttgaaaatgccctttgctgtttcaagtcaattgatctattattactatgctaaaaataattagtgaaaaacgaatgtcatggacagactatcatgggtcaaacctgttccaagcaggttttcatagctgaactcttatagtatggctccaagcctccttgccagtttacagacactcgagaagagaaacaaaccagtatagtcttttagaactagtaggtagctatacagatcatacaggaagaaccaatagtccatggaaaaatactggaaacttttattaatcaagtcactaaggtagtcataatcacaactgatattaaggcttattttgcttgttagatttaagtttcatctcactgaaaaactgataaggaaatgttacttatctattaatattaaatgataacacctaagagtgtcttattttttcttgacatgcctaatgcattcaataatgtggtattatattattttataatataacaaagcagatgtatataatatgatataataaaacaaaatacattccatttagaaatgaagtatgagttgaatagaaaacaaaatccagtatatgaaatgacatctgaaaacataaataatagaagtggtttctgtatgtaacatggaaaccatagggacacaatggcacgtggacaaaaccgaggcacctgcttgccgcttcaggctgcactctgttatgctctaggcgatgatagcagattgtgttgtaagcaatgaaacagtgataacttccatgttcctgcttaactttatgtttctgctttcagatctccctccccttccagcggaagttagagatgccatagctttaatgtctgttttagctgcaaaactcaatgctcactttctgttagaaactctaaagcaggtggtatgcaatttctcttgatttggaattctttaaaggcaagtaaatttgaaactcgagtgtgggtgggttagctgaaaccataacccaatgacattttcctgaatggaacccattttctgccagtgcagtccgtgtagccctctttctctctcgattgcatcactgccatggtcattacagactcattttcattgactctttaaaatgccaaaatgatttttgcttgtttctgatttggatttccaatggaaattataaaaatgtagggtaaagaggcagcggttaatgcagggatttgagccaatatgctgctgaacagaagaaatctggtctggaaggtggggaatctgaagtaaaaggaaagggatcatgtgcttacgttcttaggaaaaatcttgacttagaagcccagatttttctatttgtcccaactgggtaaatgtttgtcttttcatgatagaatgtagcccagaatgaaaggtatgatgtaggacgctcttcactgttggctgttagtgtgtgtctcctgtaatgagtgtgctcccaacaaagggacctggtatggaagagctctgcagtgccaggcacatatgcagctgttgaactgcagtgagacacacaaacacagactgatgacaacagggttatgcaaaaagtgaaaatactgttcctggctatgtcatagcttgcttctttatgtctgcatggagaactctggatccaaatagaatctgtgatgatacagaccaggctcttcaagtcagcactgctgggcggatggggatgggtactgagagttgctagaatagacagtaagaaggcatctgcagtaagtggctcccaaattcttatggtgttagtttcatctccaaagcattagtctactgatgacaatttttccactgatggggaacatccccaagcagagttaattgtgttgtgtattcatagcactgcaaataaactcatgtgacatgatgaaatattgcaattctactttgaaggagtctgaaaaaggaaatgcgtcctttgtcccgtttctttcctctattgtcattcatcagtaaaatgtgaagaagaaatttctctctgtgtgttttttaatttgttttgtcttccaaattttacctctgggaatgatcccttaacaaacatcacgcaggggagtaaagacattgtaaatcttgtaaggattttaatcaaaggagtatttatagttatttgccaaagaaagaagagctgatctgacattgagtcttcccagtataaaagatccactgacaaataactgatcaacagaaggcagccatggtgttcactggcatgtgacaaaagaactaatgatgtcctttgtgcctatgcaccttggcaagactttcactgtttcctaatgagcatgggtctttgggttggcactcaggaaggtttttataccaactaagttccggaaatgatagagggatgtttacaggaatgggtcactaagtagcttcttggaaactctaatttgggcaatgaatcgtcctcagtggggccatttacagaacagtgaatgccgcctgagaatctgttttagtcatttccaggctctggattgcgaaggttgttacctgactctgtctgttttctggctctggccaagagcatggcgatgtatcgtctctgtctcacaagctcagggaatagttgaaggtaaggaccgtgttaggaagcaatatcaggactttatgcctttcttttttccactgagtcttcacaattccatattttctgaaagcaaagtagacatgaagaacatgttaaatttaaacttccagaagagaccctcacctacccttttctaataaaagtctagaatagactgcagtaacttcaagcttcacttgttacacataacaaaatgtttagtttaattcatttgtcagccatgaatcacaaatatttcagaaattaaaatgttaaaaacacaatataaattgcaatatgctgcagcagttacaaatgccatccactatcctgaaaacaacacaagctataattacaacaatgtgaatgaagacattgaattctaaagaaggaatgaaagcacattatggttagctcagattccacatgttcctaaattaatccatttctatgtactaacattgattctgcttgccaagcaaatgtactgtagatcatacccagttggattaagatagttctagaccagttcaaaatccatgaacagaaaatttagtattactaatttaggcaattagtaacaattggacatgactaaatgacagtatcttacacataattaaaatgcatcacaggtaatgatgatcttttaaaagctattcataatgactaccattaatttacttccatgtcatgtaatctcatttaacatttcctataacccaaggaggctgattcgttactcccactgattacatggaaatggattaagtttgttgtcctgcctaggcttgaacaaagtttaggaaagcagtggttatttagatttctctcagaaggagatgactcccctctgcacagccctgaacacaagtccctgacttccttctagcttattccgatggacacctgctcacaggtgccaattcattgtgtaagtttctaaggcatgcacctccaattcccagactcctgttaaagggtgcagaaggagggctttctgcagtccgtgtctgtagtgctgctgttttgtcagtagtaagagggtgacttgaactgaggatccaaacaaatgcagtcttctggaatgtgatgggggcttcttatatatgcattgttaagcctgggaaggacaggcagcaaacattgttgcagcatgagttgtcaatggcattgtaaatgcaaatcagacttgttcattaaagagctttgagactatgaacttgtgccaggaaggggaactcagaaaagacaaataaaaatgacatggccaacaggtcaacaggtcttcctctgcaaattatgcaatgataaggaaaccaaatgtgaaaaatcttctcttatagttaaatgtttgtggaccatctgaatggcccttccaaattctttcatcttattacatttactaaatatttaaaattgagacttatttggcagtttcaataaggcatggatgtgtgtgtgtatgttcaagagatttatgaagtgataaatgaagtcatataacagtattccttcaaaataacagttcaaatgaaagtgaaatttgataacacatttattctaaatctccatgactgaagagcatgtgtttaaagaagctacaaaaacaactgttattttagtcttgaactattcctctctctccactgtccttccatccctgtgatctgggttaaggttcatgaaaaagcatcaggatatagcttttgtcattcttttttcatggtagtacatatttacttatgaaatcagctaagagaaagaaaaattatctcaaactgtataaatctttgaaaattgttagttacaatttcatgttgaacatctgtctcaaattttcagtatataatagcataatcccacaaatttcttctacaactatctctctgttactaaataaaactttaaatgtcttcaggcaccagtataccttcatttttgagccctattatgtagcatgagtatcgacatgcctggtatcattattggctagaattcaagtacatagatacaggtaggcataattagcattaagtatagaaaaaaaacgttactttatattttgtaacagtaatgttttgctttgtttaacttaccgggatgttataaaaactgcaaatgtgaaatttaataatttaaaaaataatgtatagaccacacatcagcctccaatcctgggatctgtgtcacctgaccagttggtttaatatctccagaatcagtgtttttagaaacgtagagtttggactagatggatatcaatgatgttgatgccaattttgaatgtcagtattttaatgccctgaggttttttaaaaagcatttctaaaattatgtgacttcttcctattttaaaaagaaatgtaatttattaattaagtgtaaaaataccctgtgatgagaaccagtgaaatattctggtcctaattcttctgatattttttaaaaatcaactatttttcaacacctgaaacagccagttacaaaacaaaagcaaaagtatttgttgcctcatctatacatagaattaacaagaataatttagctgagagaatttctctacttcttagaataaagttgctccttgcattatcataggccaagactgtgcattctacatataaatctcacttccaaaatatctcacccctttaaaatagatttctgtataaatgtatctgtaaattccagtggtctcttaccacatacagagtgaggacaggcaatttctagacagttgcctgaaggctctaagagcttggactctgacttgagctagcaaccaattcatgcttattagttttgatgtgtgtctccaatatctctaaggtacctaaacactaaagaaatgaggacttagaagatccaagagacaggaccacaggacatgagttactgcctatgtcttgtattctcttatatcattattgaatcctaaatagacattattgtctgattaaatgccatgttattacatacacagaaacaaacaatttagtcatctattagagtccatccatgtttgctgaaatactttatttttatagatttccccaagaactgataaacctaaactcagcagcaatacagatgcatgcaagagcagatgagtctaatcaaagccaggaaacatcatttgtatatgaattaggagattatgagaccttggatactcttcttctgaggctctgatctctgaagttaattttgatggtggatgaagtgaactaaaacaaacaggatcatatttgctttgttcaaatggtccttttttggtgaggggacgttagggttagggataagggttaggattacgggtatgggttaggattagtgttagggttatggcacaagatagggttggggttcagggttcagggtttaggttagggttagagttatccaaattgttcttaattactcatcttattatgttttggtcacttcacctttacttaaaagtatccataattttgtctgctttatcaaatggtgtagcaatatttctattattatacttatcactgtagagatacagtgggaaagtcccatacttttgtttctggatgaatcactcatccagtttctgagacacagggaaacatgttgactagtgtaataataagtcataagctacagcatccagttctcttaattagaaaagatgaattaatttgcgcagatgctatgtaagaaccagagaaacaactgtgatggttggtaaaagactcctgttctgactccttggctttatggaggctgttaatgttggaagaactggaaatctaaagtctattatctgtttcctaagaaatgtgagtaaaataagtacagatgagtggctgtgagaagaggagagatagatgtaggggtgaaaaaaactcggatgttccagtctgtgtcctggtctccacccacacctttcatttttcaattccactattttggaactcttgtggcataaaagtgaaactgaaaaagagggagaaaaattcaggataattttgttattttccagtgggtcttaactatccaaaatttcacagtttaaaaaatgtaaggaccaacaatgctatattgtttctaatcactgtagttccacatgaattttatcaccaggaatgtttgagaaatgatacattccttctgcctgcttcactcaacacacttaacgtcttgtatagactttttttttttgcttttttatttgtctgttatgattttgcttactcattttatatgtttgctgggaattgaatccagagcctcacactcactaaggaaatgctctatctataagccatactctaacctgtatttgtgttttattaatctatttatgtgtttatagttgtaaccaaaacatatatgccagtacttgcagttttctggaaaaacacacccataagtttcaccccgttaccaacttaataataataactttgagtggttcacactaacttaagagcaattagagaatatatttatagctctgttatagtgtagtaaccaaacattgaagaatgtacatgttactgaaatggatttctattaaacacttgacaactaccttcccataaatactgttcaacagatgaacacattaatatacctaattccttacacccaggattgccccacaacactttaactaaaatcatggattagacacttaatttgtttttgatggaaaacgattatttaataggtcaataactatttgcttgtttctttcccatttaaattttatcaactctaattaaattagaagatcattgatggattcaaattgtctttagataaatccccaaggtaaagagtgaatatatccctcctgttgtagacaataaggaaaaataatgaaaagaaaatcccaggtgagcatctttagaaatccctgaacacaacttgttcatatttaaaagctcttaattcacagggtacatgggaaaaatccctgttatgaaggtatcactccttaataaatctaaataagaagaaaaaataaccacctaaaataataagcagctcatagcattccctgggttgggaaagagatgctgccttcatgttgtttgacttttccaagaattagcccctgacacaaatagaaacagagtggaagagcaggactacaattatcttaaggcccctttaaaatatgtctcatcaatattaaaataatatcagcaggggacattttttaaaatcacataacaatactagcaaagtaattaataaagactaacaaagtgtaattacaataatatcaatagtcacaattagtgtttctagtaactgggaatatatatgctaatggatttttataactaaagaaaactatctgctactcaggtgaaaatttaatatatccatcttattagttgaaatacttttagtgaccaataaaataggtaagcaagcttaaacacattataatctttctacttttaatgaactatttatttaattatttgtgtgtgtgtgtattcatatgtgtgcatatatgtgcatgtgtgtgtactgggtgattatagacatttatgtgtgaagatcaaaggaccatataattaaactcatatggtcaggtttgttttgcaagcactgttactaactgacccatctcgctggccctaattatttatttgttaacattttaatctgatagccattatagacccattgttcatctgatgatggaggaccaaaaatgtgagagccaaaactttgccagattctaccacctctaacttcttgggaagcaacttctctctctggtccatttaatcaccactcagactctgaagttgccattggaacccctttggagctttcagaatgtttagacctatggggctcagctcactgtgcagcagaaacactaggagtttttcaaaatgcagacttttggtaccagcactaaaaataactgtttcatttggttatagcatggctcaggttattttttaaagagctcaagcagctttgatgttctgccaaagctgggaattactccactcattttgatgtactttcagcctactacaaggccaaattgaatgtcaaagctatatccaagcgtataagtaataatatcataaattaaacagatacaagacagtaatgcaatattctgagtgtgctccttttatacctgaaatctgtgtatccaggaaaaacattattattcaaagatgttcttgttacaaatgtgtgaacattatattagtactgacatggcattttagtaaagtgttatatcccaaatcacattattttagattaataaaaatatacattatctaatcccagttctagagaagcttaaaaaaatgaggatgacaatcttaaagccagcctggtccatgtgaaaagaccatgtctcaaaaagcagacaaaatgaaacaaaaacccaaaggggagcagcaaagataggaattaatgaaccagcacttgatgtgatatcttaaaaattcaactactggatgagaagttagaacctgccactgtttgtttaaatttttactttcaggtccttttcatgtttgttttatgaggctgacacaaaagcatgggtgtgaaggtttcaaaatgtttttaaagctccatgttaaaaaaaagttttggttatttggctgtttgtttttttcaaacaaaaatcaaaaactggaacaatgctattagggatgtgcttatctagacaaccagaaaatacttgaccacatataaactttcatggagtctgatctcaacagatgtcctttttaagcacctgttggagtcagctctgccactgcctcattaaatgggatggagtttaactttccaaaagcagatggcatttggaatgtcaggaatgcacatttgctccttatgtcccattctagcccaccagctcctggaccactctggtgacctttggattgtgtcgataatgagaggcatctgcaaatactcttggattcaccagctttgtttacaaagattcattcaaagtagttggattcacacacttagcaaatacagaaagactagtatttttctgtttgttgtcacccactctgagttgtctgtcaacaagagccttattgaaaaggtataaactgtaattgaaaattaaagagggttgaaagctcatctaagatgctgtctcatgtgctttgcagtataacttttcaacatgtgtttgattatattggaataactaaaaatgccatagagagtaacacagaaggtgtcatgattgtattgaaaatgatcaaagctgtgtctgtaccatttcctcaaatacattcttcatgcctgtgcatagtacagaattcaattgagtcctattggcctgaaggtcaagggtcatacatagtggtttcaacacttcagttttgagacagctgaatgtggtcctgacctggcttagtcagtgggttgatcatcttcatctttaagccttcctgccctttctaaaaacagcagggcctttaaccaggagatattttaagcagtgtatactcagtcttctcattgggtagaagcctattttggcctcttgcctgtgtcagattgacacgtgtgcagttagacttggatgctagtccatgcttctcaccactcatataagaaacttgcaaacacccaggcagacattgtgattgctagcagagagtccgtgagtagatgtaagcggaggaaagacatttattagggttgtgactgtgctcccgggatcacctattttcaggcatttgcaactcagtgctcagctttttggacatgttttcctaaaacgtggctgggatttcactccagagacacccctacttgtctctggatcctgtcactcttgataaatacttatagaagacactgccaatctgtgaataagggaaactaatgagaaactgctatctaaaacctgaacagcaaaaccaaaaccaagcaaacccaacaaacccaaaacaaatccaaaagagagcaactcaaacagtccacactcacaagaagacgcgtagaaaacacaccgagatgtgactggtttgctaactgggcttatcagtcacttgactggcatgcactggatactctgtatttttttttctctctcctctgaaaaacaattgcaagtctatgttattctatacagctgggaccaaaaaatgatgagtgtgagaaaacacagactctaaaagcaaaatggaattgaagcgggtaaagccagtgccgcagtcgtgccgttccggtgcactcatacctggtactcgtgtctgcacctctaagaaatttccattttttcacatcaaaaaatccagatacgaagccgaagctgccttcttcgccaacctgaagctgtctgatttcaacatcatcgacacccttggagttggaggtttcggccgagtagagctggtaggtgaattctgtttgaatactttccaaagcatttcttactcctcacatttgttcctagcctgagatctctttttcctcccctcttttacctctcattattaactattgttgctctagctcaaaagcagacaccttcatggcagagattgcttagcactgggggctccgatatgcagtcaatggactccaaacaaagtataacttgctgttcagaaaactctttgtagtgaataaatactgaacacattaatttaatgaggagcattgagtcactttctgctccaattgtctatgatttttttacttctttccttagttctgatcagtgcttaccaactcaattatggaacaattaaattaatttagatgtaaatacagaaaaagaatctgaaatatatagtgtatatctacatatctatgaacatagttatactatacatgcatgtatcctggtgactgaggtagctacattccagattcacttctatctctctgctgagcatgagagagtccctgataggagatgctaagtacagtatgttaggaactccccagtgctgtgtgaagtgcagtcaacagatactgttgccatccgaggtcaggaggaatcccttccataaaagtcaagtacccagagctatttttatgtttgtttgtgttgctgttgggctccttggctttgacacagggaaagatgtcatttgctggagtattagaaaaggtcttagcactaaggtgttgtccctgaatctgtattatactttctgtaacatggcctgaagctatgaaataattactgctatttcaacatgaacatccaaaatatgccagtgaggatctgattgttataattatgggtataaaattcaagtaagggtccagaaaacagacaaatcttcctgcttttctgaattttgctgacaaattaatggagcctgtcctagggttttgttttgttttctgctgttataaataccatgcccaaaaccaacttagggggaaagaatcttgtgggattaacaggtctatagtccatacagaggacaaggttctttgggcagtggttctcaatctgtgggtcatgacctctttgagtcacatatcagatatcctgcatatcagatatatacattatgattcataacagtagcaaaattacagttgtgaagtagcaacgaaagaattttaaggttgggggtcaccacagcatgaggaactgtattaaagggtcacagcattaggaagcagagaaccactgcgttagaacatgatttggatgctgtttggtataattccttaaaactaattttaaagactatgggataggaaggggaaggtggctccatgtttaggagcacacacttcccagaacccacacagacctccacatctaggggatgttatgatctatcctggcctctaaagacaatgttctcccttgcacatgtgtgcatgcatacacacacacacacacacacacacacacacacacacacacacacacacacaaataatattaaaaataaaatctttaatgaagactatggacaataaaacagatgttttgttgacaataaacaacattatgtctgtggatttctggagaataacttcaagtaacttgttttgtggaatataaggattgtctaaggatatctggaatattgaaactactttataatagctttaaaaactactttttaaaaaaaactatgtaagaccactttacatagaaaaaaatactgacttgaaaattgaaaacttctagaaaattctctgaaaaatatataaggacacacaaagaaatagtcgcaaaatttccagaagtttaatcatagaaaaggaaatacagttttccaggacaagctatgcatatgtatcttcatgtatgtatgtgcatgcttgtgtttggacacatatgtatatgtgtaattcccatctcaggagagatactgtgcatatctgcctgattttctccttttggacatcatagtttactgttttttgtagacactttaaagaaaaccaaacccccagcctagaaagagagttaagtagttaaaggtgtttgctgatcttcaggaggatctgagtatagttcccagcatctacatcaggtggctcgccaggcgttgatggtgcacgcctttaatcccagcactcaggaggcagaggcaggtggatctctatgagttccaggccagcctggtctccagagagagtgccaggataggctccaaagctacacagagaaaccctgtctcgaaaaacaaaaacaaaactacatcaggtggctcaacaatctcctataactctaactccagtgatctgtcacctccctctggcttcgctggacacctgtactcacatacaaatacacacatgtacacataattaaaaataaaattatttttaaaaagaataaaagaaaacccaaagcccaaagaattcatctagattaaaatttagctagtttgcaaaaggttggtattatattcataagtgtgtagtaggtcattagggacagtgaacccattgagaacagagactaatgtccttaaacttagaagccacatcttgtatgatccttcacatgctaaaagtgtatagattatcaagtatatagaatatctaaaatgcatagatttttaacacatggaaacacagtgctgagcatattaacacaaagtatgtaatatttacaacttgaaccaactaattgttatttaccaataataattatcaggcaaagaatattaaaataataatataagttacatgtagtatcctaaacattccccaagcctgaacataatctttccaatgagatttgaagagttcagaaatttaaaagtttgagctccatgttctaaaatgggtaaaacatttgctattgttactatttgatatacagatcacgtctgtggcattttgcatgagaatatgcctcttcatccttacacttcccaacttctcgcttgtctatttaggtaaatttaggtgcaagattatttctgtcaggagaatttctaaatgacccactttgttttgaggagatgagaacttcataagtaattcaaaatgtattcaagtctatcctcctttctctgatctgccattaaccatgctttttaatccatcttctttttctatgcttttttctgttttatatttatttttattattttttaaacaatcttattttccataccaattccagttctctcttcctccattcttccctctcccccaccctccccccaccctatccaacccttattcactcctcagagagggtgagtccttccatgggcaatcatctgggtctgtcacatcatttgggacacgattaaggccctccccctgtatctaggctgagcaaggcatccctccataacaaatgggctccaaaaggccagttcatgaaccacatgataatctcattagatgtgaaaaaagccttcaacgaaatacaacactcctttatgataaaggtcttggagagagaagggatacaaggaacacacctaaacataataaaggaaatatacagcaagccagcagccaatatcaaactaaatggagagaaactcaaagtgatttcactaaaatcaggaacaagacaaggctgccctctctctccatatctattcaatattgtactttaaagttctatctagagctagacaacaaaaggagatcaaggggatacaaattggaaagaagtcaaacttccactatttgcagatgacatgatagtttatataaaccacccccaaaattatccatgttcttaactgatgagctttgtaatgtgttcagtatgatgtgttcattatatgtttcccagcaaaccaattctgtttgcaacatcactatgtatatcagtctttaagtactaccaaaagataattaaataatttttcttttggttttcgagacaaggtttctctgtgtagctttggagcctatcttggcacttgctctgtagaccaagctggccttgaactcatggagatcttcctgcctctgcctcccaagtggggattaagggcattccccaccaacaccggctaaataatattttaatgtaccttaatgtgcaaagtatgattgtaaaataatgagaaatgtgtcccattgctttacagtaacatccataatctattcaacttctgtttctgtcagagcacctgttttcagaaaagatatgaccatgagtcatacaaaaagttttgtaacctagcaacgccagtgattgttgcactaaatattaatttattctgtaatcctaagatttcctgtacacataaactattcttagctaaaatataaaaacaaaagataaaggggacataaaactttattttcttgcattatgtatttttctacatcatttatgggaaatttaaaagtttgattagcaaaattgctcctggctttgggaactcacagtttactttgaagagagaataagattcaaccataagcaaagtaggagcagaacaggttggttcatggaagaggaagactagtgtccagaccaagcagaaggaatggagcactgtagtaaatacttgtaaaaccaaagcccaagaacacaggcttgctcatcaagtcccatgccttactaacatgatcagcctttcatttgaagcctgctttataatcttcaagttcctgtccagtttacaatcctgtccttgtaactgctctgggaagagagcatggggtgtgattcatatttcatagaaaaacatcaagatgatgctttggaagcggtagaagtctgtacagtgagaactgttgctattgcccaaaatgacagtcttgtttgattgtttgtttgtttttctagcttggaagcttttctgtcgttccagcttcaacaaatatttcaattctttcccactactgctgtgaaatggaaaaagtatatgcatccctgtcttggtttcttttccagttgctgttttagattgccccagccaaagcaatttaggggaggaaagatttattggacttacaattccaatcgttataaagggaaatcaagacagcagaaacataggcagcttttacactacagccactgtcagaagcaaagagcagggagttaattcaggcatgcttgttttctgttttctccaccactacttggtgcagaagttcctgcctaggaaatggtgccacccacaggtggtagctcttctcaccatgattaacagaatcatccccagagacaggcccagaagctaatctattctaaagtgtcccttgttgagacttcagatgattctagattgtgtcaggttgacaattgaaaccatcacaaccatttacttaaaaggaaaaaaatgttccaggaccagtgatatggctcagtagaaaaaaaaaatgtgaaagtctaaaacctgagtttgatccccacttaaatatggaaggaaagaactgactccataaaattgacatcttacctccacaagaacaccatagcaagtgtgcacccccacagacacagcatacatacacacacatacacacaacacacaaacacacacaaaaagaaataatattttttcagtattttttgagatcctgaactaaacttaatacagaatagctgtggttattgatctctgatacgtatattactttgtcaaactttcagattccctctttccctaaacatttgccattcctattttggaggcaaaaatggctgtagaggaaagataatcagatagcataacatggtaaaaatctggagctagatgttgggcattcctgttaccagctgtgcatgcttagccagttatcttcctgagcctcagtctccttttctgttaaattagcatgataattgaatatgcccctcatggggttgtaacaattaaaagcactacagtcaccacagcaatgttgtttttcctgtaatgacaattgccacttgttaaaatacactcacagtagccatcttcatttatcgtcccagctgtgttaatatagaagagttgtaagagaatgatttctctgttctccccattgccaagccacatgtcttctctcagagtaaaagcttgaggtcttccagtgaccttcagtgataaatgctactaaattctcctgaaccactaaagcttttgattttctgatctaccatgagaaatgatgggaaacaaatttccaatcttccctgtgccaacctgtggacacctgaagtagcctccgcttctttctccatttctcttctgagctgcaaagccaaactctcagtaaggaatggttttcagtgcagagcactgtatcacagccatttgcttcttgccccttttaaaccagggtattctaaatggacaaatgagaaccagatccttgccaaagggtgtaagtagggtatctctcattctttctgtgagtccaacccagcttttgaatcctgaagttagacttcctgatctgcaggaaccgtcctacttccagaggtcacatgtgtggagcagagttcctatgttcttcaaaaaggcatccaggtcactggctcagcttttttgcagctttcttggtatccacttcatcagcaagcaggcgtagaaagccatgtaaagcaactggaaacaaaatagactgagatgattaagcaataaatgaagtgacaaacccggtgctcagtcaccagggttttgtttcatcactctgaaaggagaggagcttaactccaaagggaaacccctggtacgatgaaaacatttaaagggctcctactgccaaccctcgcagcggtgaaatggaatagctttggagatgctgggtagcctgcaagtttgcctcattttgacacagcctttgtctatctagctttactctcctttgcataatattcactgtggaattatatatttgttttctctctaaaagaaatataaaagataattgtgattcatagtattgattccttaagggggagaaaggcatttagctaaataatgaaaattcagtccaaaagacactaatggagcataactgggtagagaacaaagatattgtcaactcatttctttttctttcattgtattagatcactttattgtaataaattcacaaatgaaaccatcccacagccagattaaggtagccaccaaagaaacaccaggccggttccaacttctgtgcattgcagtgaacttctctttacagctagaatggccattctggatctatggttcttcatttggacttttatacttttactatcaactatatttttcaggtttatccactataaaaaaaagaaaaattctatgacagagttcaaactagagctaattttgaggtaccgcctcaccccagtcaaaatgaggatcaaatgttgggaaggatgtggtgcgaggaggaaccctccttcactgctggcaagagtgaaacaaatatagccattatggcaattagtttggaggacccacaaaaaaattaaaaatagcactaacatgtgacccagctactcactcctgggcaaattcccagagagctccatatcccctgtagcaatagtcatgtttaattgctgaggaagttaattcatcttgttcatatttcagaatatatattcaattgtgcatcaatagctgtgttctaatccaggctacatgaaggagggcaaatgcaattaatatcatatatatcttttgaatttagaggaatcttctatactacctatgcattaaagtatttgttttgtcatgaaaattacttaaaactattgtcttaaaatagtaacttttttcctccagagttagatgtgatcctagaaaagtgctctaaatatagtaggcattggatacatttcttcatgtcttaaaacagtgcatctagtccggcggtggtggtgcacgcctttaatcccaggactcagaaggcagaggcaggtggatctctgtgagctcgaggccagtctggcctacaaagttacacaggagagcctgtctcaaaaaaccaaaaagcaaaccaaaacaaataaacaaacaaacagttcatctcaaagttagcatttagattacatgttcttttttgtttcctacatcacaaatttacttatttcctagtgaatatatggtcataacacattcagcttgaattcatctacccccacaaaaatacacaagtagtctatattgaatacagctacatcagatatgattctaggcatcaaagaatttttgcctcctaagtggatatgagtaactagtttgtggccagcctgggctaaatgagaccttttctgaaaacaattgaaaggctagcagcatgtaaattcagacatggctccgaagttctgtcccttacacagtgactagcagatcatttgggtggcattgatcaaagaaacaagcatgacttctcttccgactcagttcatatcacacccagatgtggtatgcatccatgaaagttttacttaaacgtgtttggaagaggatcctatctataagcaggcaaatggtccctctgtgtatgttgatagccatcacctttagctaaaagggaaatagttgtgttttatttaatgatagactgatttcaatatagtgaataggtttaatctcactttctggaaaagtatgaaacctacaatgctgtgtgaacttaagtggatttatcaactgagcacaatttctgcacatgtttaatttattaccaatttataatatctccttcacattagcatcctccacagccaataatgtatatagcttattgacctgaagactgtataaagtcaggagttttgtgagccaagtgactattcctttttaaaatttgtattggcatataaccattgtacatagtgttgtgttttttttttttcaaagatagtcttactttggcaatattcatatcccttcactccctctatttaggacccctacccttttccccattctttcttccccatctctcttctatctttacaacacacacactcacacaaacatattattttatgcatatttaaagaattttaaggcccacaatatcaaaagcatgtggttttttctctctgtcttttttatttcacttaactttatttccagttacactcattttacagaagatggcatgaatttttcttctatatggctaagcaagcttcatcggatgtatgcatgtattctctgttcattcacctgttgatagattcggaaggctgattccataatttggttactgtgaacagcaccacagtaatggatatcgaggtatctctgtgttctcttaacttagagaccttagggcatacgaacagaaattgtatagctgtcttgtatgaaagtactgtttttcattttctatggaacttcacttatgatttccatggtggttgcattcccatcagcagcatttaagattactttgatctacattctcactggaatttgttgctttgaaaagttcttacctatacctatatggcggagtgttttcctttagtagtattagagtttggggtcttttttaaaaatatttatttattgcattatgtatacggtgtcctgtctgcatgtttacctgcagaccagaagagggcatcagatctcaatataggtggctttgagctaccatgtagttgctgggaattgaactcaggacttctgcaagagcagccagtgctcttaacatctgagccatctctccaggccccaggtccttgatccattttgattgattttagtatgtagtaagagtaagtgttctggcttccttccccaacagatggctatctagtgttcccagccccttttgctgaagagggtacctctcctccacagtatgtttcaggctggagttgtactgtttcacttctgaggactctgttctatgatgttgatcttttacctgtttttaatgccaataccatgctgattttgttactatggctctgtagtatgacttaagtcagatatgatgatacctccagagttgtttttgcccagggttgttttggctatatatattattatctgcttccagatgaattttaggattgtgtgttctagttctatgaagaatggagttttgcttgcaattacattgagtctataggtcactacttgaaatttgaccatttttactatattaactctgttgatggacaaacataagtggtctcttcctctagcatcttcctcaattttttcttagttttaattattttatttttagttaaaatagaattatattactttccctcttccctttccttcctccagcccctcccagttaccttctctgtaaccactcactcccattccctctcactctcaaattgataacctctttttcatttgttattgttatgtacatgcatatctatatgtgtgcatgcattcacaaatatataaacacaatgtgctgaatccatattcattgtttgtggtatattgcttcagagatgagcattttgtaatgtataaccaataatagaggcacatccctgggagttgcctatagttctttgggctgcccaatatccattaattcttccttcgataagttttctcttgcttatctttttgaaacccccatgaatgggattatttgtcttatgttgttctcaacatgaaatgctctccctcccacactagcatgcccactgatattgtcattgctccagccccatttattcagttactgtttcacagctgaattctggtatgtagactcttaagatctttgtgccctctcttcagtaatgttttcaaagccatagattcagaaactgtgatgtagacctatctattgaggctgggctacccaatatccattaattcttccttggctaagttttctcttgcctatatatttgaaacccctgtgagtgggattatttgtctgaggtcattttcaacacatttgttgatacatagtaagattgctgatctatatgctaagtctgtattctgcctaagaaggtagatgacctgtgtgctaattaatgtattctgtctctttgcagaaagtgttcatcagttaaagatgttctagtgaagtcattagggtcccttgtacaggattgttatctgtaataaggaccatttgacttcttttccaacgtatatcccacttatatttttccttccttattgctctatctaagtcttcaataactgaactgagtaagagaaagtggacatttttgtgttgttcctgattttagtgaaattctattacaggtgtattatacacagcctttattgtgctgatatatgttctttctattcaatatttaattcaagatttttatcatgaaagaatgtttatctgtatcaaaggtcttttctgcatctatttgataatcacatgatttctgtgtttgaaactgtgttgttttacattttttggttcacaatgttgaaccatcatggtaagctaatgtaacccttttgattctggtgaatcttctgatgtaaagttgaattcagaacctcagtctcttcaaaatgtctgttactaaaagtttagtactgattttctaacacctgtcttaagcaagtgttctggccctctatagctgttttctctcactggatgagcaccccagttggaggtaattcgtttggaatagaccctggactctgtctccttttaataactgtaaagttttctatttactttgctactattatctcttcactatcaaccacctctcacaatccctgcaatccaatgcatctcaaccacagtctccccactccacgcctcactgttccccactacacctccccctcccccacacccactgttcctccatttcccttcataaaagaacaggccttccagggatgtcaacagagcacaacataacaagatgtaataagactaggcacaaaccctcatatcgaggctggcataacttatctgattcattcttacattgtccgcaagtttgggtttattcccatttcatagtgcagaatagggactataggaggtcatgtgaacttcaaagataatatgctttatatattcatataatatttaaaaattgattgggtgggtttgggaagaatcgggaaggagagatgggaagtcagtaagatcagaatgccttgtgtgaaattctcttcaaagaatgaataaaattattacattaaaataagtaaaacatttttaaaagtgctgacaaagaactacgattttgactaagtcatttagaaagattttcacaattacatataatttgcttaagctgacccataattccttttttaattataagcttttgaattcacattgatttttaaacctgtgtcaatatttcacaacaaaattagaacaaaaagaaatatatttttggctagtgagagtaatgtcttgatatattattgaaggtaaaaagacaaacagaaggaaatgcctttctggcacataattctctaaaatacaaactaaatgtatagctgtatcataatcaataaaataactagaaattatagatgtgtaattttctaattttcccattttaaaattcttaaacagctttattgaagtacaatgtgcatacctcaacattttctactgtgctcttataattcaaagaacatttctgtttttgcaaaaaaaaaaaaaaaaaaaaaaaaaaaaaaaaaaagagccctgtgcctccctttctacccccagccttagccagtcatgcatctatctaccttaagtcttgcctttcctggtacactgtttctacaacttttaattgcactcagtgtttttgtcttctacatatgtgcttataaaacctattaatgacattaattctaggttgtttgatgtgcagtagttccattcctctcctccctctttaatttagaataattctctaatgcctctgaaagctgctggatgtgtactccaaactcacctacacatgttgctcacactgtatcttgaacgtgtactctgtggccagtgtctgatttggcctgggaagtgtttagcagggaatatttagaaaatgacggtgaaagaaatctgatgcttatacatttatagtctgatggtttgtttaccagtgttctcagttgttgatggtttattaatgcctttatatcacctccattcatctgctttgaggactaactataaatgaagtagagtggaacattctagaagtttggaacaatcttctggtataggctattttgccctcagtataggtatcttgggcttgcttttctttctattgtaaaaaaagtgtattactataaattcattaagtcatcacaatttgtaatcaatgtgatttacttaaatcaaattattgcaaaaatgttcctggtttatttataaagccacttcctccctgattaaggaaagccaatttaagggagaaaaaaaaactactatgttctactatgcaccacatgttacttgtttaaaattttgtgctattttcttagggaaaaaaaaaacatttgccattcctatgttgcagctattataattaagatgcctctgcttagatggccttgtttcagtgttctttggaaatttttcataaaagtctttgttccttaaaagttactaagttacaactgaatgtggttgaaactacgtcctttttatgtgtagttgagacagtgtgcacagtgtgtgttcaccgtcaccccttccaatgacctgctcctgtttccttaagtcatgctgctattgcctcagtcatcaaaccctttctctctatctgaaatcattttgtatgaagtttgtatgaagtggagggtctattcatactttcttctggactttaactccccaggaacttagagaatagatcctgtggtttaagcatcagtgatcttgaagttccttctcaacttctttacttattgagtcttacttctttacttagtagcactgagctgaaattgggcaagaaaaaaaaacagccacaagtgacactcagcttttggtattgtcagtgacacaaacccagagacacagctctctgctgccacctcaaagactgaggcgttcccttgtctctcatggttctgaccaagtggtgttggactaaattattggccttggccaagaaaggaattcaagatctatcaaattatgaagcacagttgggatttagcaaagatatttcaatccagatgttaattgtgaaggttaagagaatgatgcttggggaaagggcaacgtatacccaagtgtaagaatgcacttctcgaaggaaggttcttccccattgtctttatagcagccacacataggatactggtggatattgaagctatcatcttcaaaggattgcttagagacttaagtgagatctcatagtattcctgtgcactggataggattatatctgatcttgagtcacatgggtttcagggaaaattaagatgtttttactgtaaacaaagatttgagactcccagataatgtccaaggaaaggaatgaaaccctactcagggtcatattcattcaggacttaagcctgataactttcgcttagaaagcacactaccactaagctatattacagcttttgaaaccttgtaaataatttccacaactaggatttaatttgtattactcataaaagtaaaatacattaagtctataaattttaagcaactcaaaagttttaaggaagtattaactaaagttatacataaatacatgattcaatttttacatagtgtctaaatttggcatattccattaaactcatatttgtaaacatccatcattgtaccttcattttgttttatatccagctgaaggaaatctgtgtgtatttacagtagcttggctccaaatgtcctgactatgaaccaagttctaccagttggtagttcaatgaacttagataacgtgtgtgtgtgtgtgtgtgtgtgtgtgtgtgtgtgtgtgtgtgtgtgtgtgtgtagtttccctttgactttaccagttcattttattagttatactgaatccacttgtgccaagtagattgcttctgtgaaaaggcagaattttaaagcaacatttgatttttcctgattgatatagactaccacacaggtcagaaagactaatagaaaggccatcaaggatgccaagtcctttaggatcatgatgattctacagcagttgctattattctttggcaagaactaggtcttgccacagttaagcaactagcccaagagtctaaaagactaagaagggacagaattagaaccaagacctgtggttctaaatgatgacctctttcctaccctgtacagaagtgaaaagccagtgttatcaataaagagaacaatgtctaaattagacatctgagctacactgggttctctttgttttctgaataagactacatttctttctctttggaatgttcattccttttagaattttatttttctcacaacagcccatttgtcattccatcttcttagtctgtccacattccctttagaagagattttccccattttgtattttattatgaactgcaactgaattcgtttgtgccatactaatcgatcattttaaggagtttcacagacagctgaactagagagtctttggctgttacagacattttcacgttattctttttttccctttaacttgtcgtgtaatgcaaactcaactgtcatctgtgtcctctcatttccttctgacatattaagtcttctcagactgaattcagtccaaacactgtgcacagactagacacttaaaaatttgctaacaccgtcaccattacaaccagcagtactggtgcacagctttaatcccagtactcaggtggcagaagcaggcagatctttgtgagttctaggccatcctagtctacagatagagttccagaacagccaggactacacacagaaaccctgtctcaaaaaaaaaacaaaaacaaaaacaaataaacaaaaaacaaaccaaaaaaaaaaaaaagaaacctttgctatccatacaaatgaagtggtgaaggattcaagactcaagaatgggcaagctatgtttcagctgaggcctgctgtgttgtctctgatgctttctttgggtctggataatgttgctggtgaacattgctgcccagttccactgctggagaacactccatgataaccttgactgctgttaacttactaactccatcagggcccttccttgactcacagggctcttggttgaatctcttgtaagcatgaacacacgcctgcagcccatttgagataagacattggagggtctcagcctccttcctaggcacagggagccatgtgggctgcaagagatgtaagctcactatattagtctacagtggatacaactaaggagtaagattttaagatcaaaggagattgataccatagagcatggtatcaaaaaaagtggtttttaaaaatccaaaaaagcaccttggtacatacatacatacatatatatatatatatatatatatatatatatatatataatataaactggaggcaggaaaagattggaaagtaaagtggatactaacagttacgacttatacatctccagctccagtagggaccaggatcaatcactaaacttaactctaaaagtgtttgtggatgaggactttgaagagtataaagtcccaggagatcatgtgatcacatcttgccattagcacatgaaatagaatttaagaggaaattagatgttttttgatgaagactatgcattatactcactcattatatgaaataaaataaaacgtgaaatatatttttccaattcatatgggcacaaaattaacttgtttaattaataatttaattaatatgacccagcacagtaagactaggggatggttatacatggtgtttgtaaactcagtccctctagcaaggatatcatcaccctgtgtgacttgcgtggtagttgggattcatttatatcctttatgtatctgctcatttgaggacaatggtgcagtctggcatattaagtctgtagattctcgctcatgtgccgtttctatgtgtctttaaggtccagttgaaaagtgaagaatccaaaacatttgcgatgaagattctcaagaaacgccacattgtggacactagacagcaggagcatatccgctcggagaagcagatcatgcagggggcccattctgacttcatagtgaggtaaaggcacacccctaaggatggatgcaccagctccaaagggcaggtcaagcgcagcccttgctcccgctgagcttacccttaatgtagtgatttcatgttcccaaggaaggctggggaaaattgtgtttggttttctaaatataaaaaggtttgaccccatgtttatttttaaagagaatcatattctcaaaaaaggatatttttctcaaaagagatgtcaactcaacatttcatttttgtcatagctctgcaaacatcctcattgaacacaagagacagaaaacaaaagaaacaattaccaaaatcagtctatttagtgttaattttctgaaggattatttttgtgtgtttgtagtgtgtgtgtgtgtgtgtttatgttcacatgtactcatgagcatgtggggggggtgtgcagttaaatgcaccatgtgtgtggaagtcagagattgatacctgtgacttcttcagccacactgcaccttgttttttgagacatggtctctcactgaacctggagctcattgatttggctgggctgactgaccagtgagctcaaggttctgcctgtctccgaccagccaacactgggcttatagatggatatagctgtgcccaaatttcatggggtactgaggatctgaactcacagcctcatgtttacctggcaggtacttttaccatctgagttattcccctaaccccagtaggtttcttttatgaaatggcaactaatctgtctaccttaatattttcatattactaataaggtgataatgaagctcttatatgcaagagaaattttatggtcaatttgccagtaatacagaaagttaagatataaatttaagttactgtttacaatctatatttataaaatatgatatactttatatctacatattttgtgcttatgaccactaaattttgctcaaggccatgcttggaaaatcagcaaaataagaatgatagaacctccagaaactctcatgtgcacatacccattaggactagcccaagccagaagcttctagtgctatagtttgtaagtgttaggggacactggcttctggaagacttcagtgcctgtatctcatcaaaaataccaaaactagcaatcaaaactcaaaacactgcaacctgagtactggcttttatgagaagaacattgcaagttatctctgttatctagtttgaaatgttcaatacaatattataaaccctgcaagttgaaccagaactcattccttccacctcagcttcgtactgcaaacattcgatacgtgtgcttagtaccctggcttagctattaagcggcacgtatatgtgttaagacaccttgttgtagtccataattttatatcaatatatcaacaaaataactcaccaaacttaaaaaaatgttttaaaagataataatgttcatacttttgttctcttgtttactgttcacaggctgtacaggacatttaaagacagcaaatacttgtatatgttgatggaagcttgcctaggtggagagctctggactattctcagggataggtaggagatttaaatcttttctgtcatgttttggaaaacagagtggcccataatggtctacaagaggaatccatcatcatcatcatcatcatcatcatcatcatcatcatcataaataaaattatatttacattttatgtatgtttataatttcaaatgtaaacatgagacagccaatagcatatagaatttactataagatatgtaaaactcaccttgtaactagtggtaagggttgaatccacattaaaaatgatcattaggaaattatgtgattatcagaatgatccagctctacacctcaaattcctcactgtgtgataacttggggagacccagagctgcatcgtaactacagtctgtgttgcctgacactttaattgtaccactcagttttcagatagcaaccctatcttttatggggtaaattaatctttaggggagaaatcaatcctcttatttgcccctctttatgtaaacaattttatttgccctcctgcccttccttaggaggtaaaatttgcctagagagtacatatttgtttctctgaattgtgaaaagttgttttctttatttttctgtcatctacattttttttgttgttttaaaaaacaactttgttttcctacaaatactttttggttacttcctataaaggacctgtgttagagatcaattctagagccttgtacctgctaaacaaataatctatcactgagctacattcccaaatattggctttttgcaatagggcctattatgtagcccaagctgccctgaactcttgctccccttgcctctgcctccagagtgctggcattgtaggtgtgtgccattgtctttgcacttttggaaaacttctttttcgtatttgttccaacggtgccttcaagttcttctccattggataatcaccactaccacccccacccctgcaaaacttaactagagatagccctgatgtccctaagagtcataaaaattttaactatctgttacttttttagataacccagatcaagtggttctttataaattcctgactaggttctccttcccaaatctacctgtttagtgcctttgtgtcttcatatagagtatatattcaggcctttgatcccagtggccttactcatatatatgtgttaaatagatcgctttctgctctaatataatttcatatactagtgttttgtttgatttatcagttatcgtagcatgaataataaaaatccaaagactgatattggggttcaggctgaagaccagagaataaaagtggccaatcactagagttctcacctctatcaatgcttagactgaaagggataattgtgacctctgattatatctccaaattgcactgctccttagactgcctagactgcaatgctgtccaccaaaactcaactgctctttgagactacactgggttcctgccttatattctctctagtgctgggattaaaggtgtgagctttgtttctcttttagactgcttaactctcatgtagcccagggtggtcttgaactcacaaatatccatctgtctcctgagtgctaggtgtaaaggtgtggccaccactgcctgtcatctatggctaactagcggttacaggtgtggctgactagtggcttcgctcttaactgggtgtgtggttaactagtggcatagctctgcattctgatcttcaggaaagcttcatttgtttagattacaaacaaaatatcaccacaagttatgattaaaagaaccataaaagaactgcatgtggttgacacaggatgaggtcaacacctatattaagctaccatatcagggcaaattactgcattgtcgttaataattgagtcatgattttgtggcaggtatagtgagagtatcctggatatattttaggataggtgtggtcccactcctcagaacttgctgactattccaaaactattgttttgcctgtgatttcgcctctgacattcttcatgtgttcgcctatatcattttcaatctgctagtttgtgtgaagccttgtttctattttctgttaattaaaacaggaggcttgtaaatagaattaaacagggaagtgtaataaactgtacagaggaaggtccagccatgccctcagagctctgtaaaatttgtgtttttcctttattgaaacagtaattataataacagcactagaactcagcctgcaagtatcagacgtgcccactcatcaatattcagtgtatttttgcagggaaatatcaccttgtatttttttctcacacctcttgagattacaatttagttagtcacacgtgagctacacttactcagcaggattacaaaaggtgactgtgaagaaactgatccccttgggaggagtggatgggtagacaataacagtgacaactcattcctccatctccaggggctgtgttatgtccttcccttccccctcccttgtgccatccttgagttctgggtacacggtttctttgaagtccagggaatgtgactgatagtccatgacaaaccttattgtagagaaacaatggctgcttagttctcccaatgattccaaaattctgaatctcctatggaattattgcatggaaaactattataaatatatagacttggaatcatttcccccatccatactctttcttctgtgtacaaatataatctcattcttttattctacatgaatttattttaccttcttaataaaataatgggagccaagtttgctagttcattcctgtaattccagctaatcaggaagctggaggcaaaattccaaaattcaaagacattctaggccagcagatctcagcctgtgggtcttgactccttggtggtcaaatgaccctttcacattgggtcacgtatcaggtatcctgcatatcaggtgcttacagttcataacagtagcaaacttacagttatgaagaaggaacaaaagtaattatatggggtcaccacaacatgaggaactgtattaatgagtcacagcattaggaaggctgagaagcactgctctagaccatcatagtaagactccgtgctgaatattaaaatatatacttgcatagcatataaagatttctgatttagaaccttatgatgaaaaacaattacagaacaaacaaataaaaaacacctaggccaattcattcactttttcttcttgtgtccaaagaaggccataataaggacaatattacgctgatagtatacaagaagagcatatgagactattggaaagcagacttgtgtgacaatattctttattaaaagtactctcatgcaacctaagcgcacacacacatacaaaaccgagaattagattgatgctacacgtagccaagctgtgaggactgtcaagacctaagctaaacatgatgtattaattatcccccatattcccaggtttactctttagtagctatgataacttatcatctagttcatgagacatttttcttcaaaagttcttttttgttctatgggataagacaactacaaattgtattttatttgatcatctctaacatataaagaattaataactcctgaaacttttaaaactatagttagctaacataataaatacatattagtatttgtgttatcaaatagaattcaataatgcattagcatgttaataagacataggacatatatgtgtcaatgtgagtattttacatataatttaatctagtaaagctgcatgttgattattagattttttttatttgtttgttcattttctttctgctggataacttaagtatctcagaaatcatgatttttcaaatcacacaccacctcaatttctcatcatatgtcttcctggatagagtttaggtcctggctattttgtggagggttattatttaatttcttctttggtcacttaatagatggcactgatttaaagtattctaaagaaatgagtctgtctacccaatagcctagccaccccactttacaatgagtcataagcctgcatattacaacatacttcagatttgtgttctcactaatgactgctgtcacttgttagtggttcctggccccatttcataagagatattttgtctttgttacattctgacatctcggcattcagtttctggtaagctgagtaaatgctgtgatttaattttaatttcagttcatcaattaatatatatataatatatatactatatatattatatatatatatatccctctatttctatcaaattgtcatttcataccatttagctaaaacagcaactcctaaagaacgtctgagagcctattcccgtagtttgacttgaaatgatatagctgtcaatgctaatttctttatttcaaagagctaaacagaataaatgatttatttctttgagcaactctctcaactgttgttaaaataagatttcacttctatttagatcaaatttatattgccattaccaactctaattgtgatttttcattttgagtcactctaatgctatgctctgtggctactttcagtagccttgatcagtagtgggacaatgcactactgatacattgttggcatgaatacatttctcaaagtttgagacaaggatttccttaaacctttaaaaagcagttacacataagcttttatatgggatatactcaatatagattgttgaaagaattagaaaccaaccttctagaaccttctaaatttgaaaatggctcagatccaggattggtactcctgaagaaagaaaatattcaatctctgaattcaaacaagccatgcagtgtgaagtcttctaaaacttcagtcatgtgctgttttgattagcatttgtctggaatgttttatgttcagggagattaaagtcatatacaacatggaatgtatatatacctacatacatttatgtatattcatgtttgttttttaaattaaaacatttattttcaaagaatgctctattcttaataggcaaacatactaagactttattaagagcaaaggagaaaaggaactcaaagcaatgctctaatccttttccagtctccaggattgcagatttgtaggtctgcctaggttttctaccccttaaagggcaattaaagcctaaggaacaccatttattccctgctatgtatgcgtttctttccagataaccttcctccacccctagaaattcacatttgtgttacttggtatcattgggacaatggtatattcttagtaatgtgagctaaagttctgatatttagaggaatagatgtcatcatacctagagcttaattaaatcttgaattttatttgtgtgatttgtgtttgagataagggctctctacagtccaggctggcctcttacctacgcctcctgggtattgggattatagttataagctattatgcctagcttagctgtatttcagaccagcttgttgttttagtaactactcagtggatacataagataaatgaagtctgcacagctgaacatactatttctaaataaaaatgggtttcaagacatctgctttaggcttggatttgcaggtgaattttgtaaatatgtagccacattaaaatgctcaggttgttaaacttcactccagtttttaaaaagaagcaagtgtcaccaaaatgcaagcaagcatcagagacatacctatgagcaagctcctgcactgctgtttattggacaccacctgaagttgtggtagctcctatttcaccacagccacttcaagagctgataaagttcttgcaaacacccataaattgtgaagttattccattgaacctcgttattagagaaagaagaaaaagagtacacttatcttaagttctagaggcaaggagtgaccttggagccctcttttattaatattttatcaataaacttatatatatatatatatatgtacagataagactgagagagacagagaaagtgctttctcataaatgttgcagtttaacatttcctttcaatgagtttttcttgtagctgtattttagttccatttcttcctactgatgagaaggcaatggtgcagaaggtagatactgtctgtcttgatgtcaaagaagttccagagacctaacatatagctggtgagaagatatgtgcagttcttggcatggttctctgtaaacagggacctctttcattttcacattcacaagaaccatatctacaccatttaaaaagatccatatataaatttgctaaaactaaccatgaacaaatcggtatacttaaattgtttgttaattatccataatatacatatatgtttattattgaaagtgaataatctctctgttcaatccaacttatttggactagagatatagctaaatgatacaggatttgacaagtgtatatatgaagaactaactgagtttgatcccaagtaacaaagaataaacaataaatgaatgaatgaatgaaaataacctctcctttgaaaagcaaacacttagtaagcaagtgctaatataggactcattcttctgcccacagcagggactctgcattttttatatagcggtgggctgttaagaggaagccacaaagttcacgaaactttaaagttgttgatcacttcttgagccttccaggaagttggatttaactgtcccactcttaagggtaataattctttggcttgatcctccgatgttttaaaaatgctaatggaatgaaacccatgtcatatggagccctttagacattgccctctgagccaactttagtgcagaaataaaatgaactcgcatgcacaggaaccagtttttctctcgagaattaattgcttatacactgttcattgcgttttctgttttcaggggttcgtttgaagattcgacaaccagattttatacagcatgtgtggtagaagcattcgcctatctgcattccaaaggaattatttacagggacctcaagccagaaaatctcatcctagaccatcgaggttatgccaagctggtcagtgtattccacacaagggtcgtgacctaagctctaaggactcatgttcatttgttaacacaaaattgactttccacttcagtgttataacttcttgtaagaggtgttagcatcatagttttcaattacaatgtttcaaattatttaaagttttatgagaaattaaatttgctaggtttgaactaataacacccccacaaaacatgtgttccatcaactttcaggaaatgcccttgttggcacgtattcatagacctgaaatcacttatacataatagtccttatttctgcccagctttcttccatctaaatgcaatggaaattagtgctatacatgactgtgaacatcttagtatatgatatttaagaataatgttcatgaggaatgagttctgaggtagtattatctacattgtgctaactgcagtaacactaataattggttaagcgttcttagagctactgtgtaagagaagctctttcatttaaaaacgtccaccttctgtgagctttggacctgttggtacctgattctagttgtaaacttttgaaattgttacccaggcttggattttaaaatacatctgtatcaatggaatgtaactatttgcatctaaactaactttgcaaaaaggagctttctgtatttgcagctcctccagaaagttccacaaaagaggatatactttgttttatctgcttgtcatatgttcaatactagaactgtcaacttcatactgtccagaagaaggcatgtgtagtctaggaaaacttttatattaacccacctggatctctgcctcttttaagcagaaattcttttctctatgccacaatcactattggcaaaaaaaaagtagaaaaagtaagaaaacatttctagaaagagccttttattccaatggtttcaattttatctatgttcagggttcactttcttcgttggaacagaatttgaatggggcatctgtgtttgcaacatatgtgattccttttagaagacaggactgtaatgacttttatttctgtattggtatcatcagtctactcagctaaatgcatagttttctacaacttgatcataaatagcttaagtgtgttgctttctctctccataaggttgactttggctttgcaaagaaaataggatttggaaagaaaacatggactttttgtgggactccagaatacgtagccccagagatcatcctgaacaaaggccatgacatttcagctgactattggtcactaggaattctaatgtatgagcttctgactggcaggtatggacatttacagggaactgcaaataacaataggcctcagacagctgtgcactcctgcctttggcactctgatttgatgatcctttcgcaggaacagtgattggtcaagtcaataaaataatgaacccaatgaaagtttcagcaacagaaaaactgacaaatggggtgatgttgtttttaaatttaattatttagaatttagattaaatattttaatgttattgaagagaatataaatatattctttaataccattttattaccagtgtcagtaaaaattaacttggaaggaaagctatagatacatttgtttctcatcattcaaaatttgtttctcatcattcaataatctcaaatatttttcagacactaggagattaaacagaattgtgtgtgtatccatttgagtggcaactaaagctacaatccctagctaataatatactaaagtaaatagaaacacacaaacaatcaaaggtggtactaccatagcctaaaagtgaagaaatgaactcatattaatgacaagggttcataaaataaaataattcttaagatttattacctggggctggagagattgctcagtggttaagaacactagctggatttccagaaatcctgagttcaattcccagcaaccagggatatatgcagacagaacactgtatataaaataaataaatatttagaagagaaagaaggaggaggaggaggaggaggaggaggaggaggaggaggaggaggaggagagaagaagaagaagaagaagaagaagaagaagaagaagaagaagaagaagaagaagaagaagaagaagaagaagaagaagattacccaaagaggaataaactctgtatttagagagtcaggaatatgataatcacccaagtgccacctgtgaggcagtgtggaaaaagcggtagagttctggagacagcacaatgacaaacacagggaaaagaaagggtcaaaggaaggagggaccattgcacaagctgcatccatcagtgattttgctaaaaagtagcctgtgaagacttccacagtgctttgttatttctttaactctcattccattgtcattagcataatgtgtatttcattccattgtcatagctaatgcaattcccccacataacagctgacatcatgaatgtggctgtaactttctgattcttattcagagagttaaaataccatctctgtgtgtcttcttcctgacagcccacctttctcaggcccagaccctatgaaaacctataacatcatactgcgggggattgacatgatagaatttccaaagaagattgcaaaaaatgctgctaatttaattaaaaaattatgcaggtaagtatttgaactgcatcattttaaaaggatcataatgtgaaaatattcaacttttttcacatgacaattgtttcatttttagggacaacccatcagaaaggttaggaaatttgaaaaacggagtgaaagacattcaaaaacacaagtaagtgatctttcttataagtgaaaaagtatgacagatttccccagggtggaagtttttagttattggttagaacattcaaagagagtgctagccttttgtaaacctttctatgtgtatctggaaattatactcattgatatccagcaatccattgactcagtttctctcaacagttaccagtatttatttgttgtacacctttggaacaaagaaaaatatgtatatttctaattttgagactctgttctctctgttgcataaggaaaacaaaattgctccctgaatcataccctattttttaaattaaaggcaaaatgtatagagatacatagatagaggtttctaattgtcagtcactgtgggatgtgagagatagggacacaactctatattgcacttagtgtagatgaagcttttctttagggtatctttactcaggtgaaaataggattcttgactttgctgcagaaagcactgcactcagatcaggctaagatgaagcagagctcaagttattgaaagagatttctaatgtaaatagtcagaaagaatatacccaagtgcagatgtgagctgctcaaaagtgccacacttgggtgtcttaacagtagccgtgtgctcaattttgatgattattaaattgtatattcaaggattgctagcaatctttttatttccttttttccttattttggcaaatgagatcagaagattgttctagagatacctgggataggatgaaaaatctggtaagataaaactatgacttaccagggttgcaaaaggggattaggacattttttactatgtgtggcctttccagtgagagtcctagataatattaaacttatagctgggagagaagaaaggccatgtacatgtaagccttaagcagattccttgccattttaacaattctgtagaaaagtaacattgggtctatgtagcaaatggttagttgggatggaactgttggctctgatctagcaggaggctttgaccagactccagagtgaagcctttctcctccttctcatgtcctcttaattttctctttctgtcttgccttggtttccttctctgagactatgagcccttaatcttaatggcagataatattcaaagatctatattttaaaaatgtctttgctctgaaaaaggatgcaaacattgaacatccagacaactaaaatctcaacctgcagactgagatgagatgagaaagtctgagtttggatactggaggaatcatcatcccatggaaatctccatgagacagtatggttacctgggacaacatatcatataaataagagagtgtaacatagattgttatatttagtattagcaaccaaaacaacagagcctctttactcatgagatatctgactattgtgatgctggcatctaattaaaactgaagtcagcatctaacctagattgatcttcggacttgacacaaagcctggctaccagatatatatacttcactctaataatgaagggcatgggttctccatgtgcttctatcagaatagtaagggtcactgtccttattatcttttttaaatgtagtgtttgagaatctcacatatgtacacaatgaaaaatgattgtatccaccctatatttcctcttccatttcctcatggataccttttgaatttcaaagtcagagcccttgggctctcataaaacctactgatagttctatactggtcaagtggcaaaacataaaagaataattccaagaaggaatccagtgtagaataaattacaaagaaaacagagtaaggttgcgaccattgagtatgctaactgtgcctaaaaacagaaggacacaaaaccaaacatgtaaatttgtaagggggaatttatctttggatttaggaagttattatattaagatgtcttgtttatttattatttcttgtttgaagacaatttttagagctttacagaatttacaagtttaagtggcatgttcttgggatatcactgaggctagggagcctctggagggaaaattttattatataacattttgagttctctcactctgtgtgattagatatctatccaccctgagaagttgtcagcacacataagagatacttatattcttgacaggaaagcatttgagtaagatctcattgtcaatctcgttctcagaatgtaccatccctttgtagtgagttaaggaaaggtgcttagttctgcctccttggtgattatggagacagaccagacaagacattgtaactatttggattagagactttatgatcctttaaccccaaagacataaatgacgagaacagttaatgcctttcttcccaggggagcatgagtcacaaagtctctggatacttttcttttgagctgttagaaacaagagatttatgttgccttgagttcaccagtcatttccgtcagtatgtggctatgccttctctaatttggtataagatagaattgcatttggtctgggaaaggtttattagagccatttctgtttatcatctaccaacattgccacagctactatagcttgtgagcatcttaactatttacacactgtagagaccagctgcagaagcaagctgtgaatgtcccctagtttttaagagaggagtcataacactgtcttatcctgcctcatataaaacacaaggcttttctaaatgaaaacttcccagtgctggggctgataagaattcctgtggcttagggtcattcttatcaataccacacaagtctatttagtaagtggttctaagttgctagttaaggcaaagaaccaagccccaataatgaaaagaaaattgacattgtctttaactgttcagagttttctgggacactttgatgttgactgcaggttttgttaagaaatcttgagcaacttcattcttcaaaagcatccatcatcagagctgaaagcccataattcccttaggaggatagagctagttagggatggtatctgtgctgttttagcacttgtagaacatcagcccaggtcctctgtctttggaaatctccactgaaaagtcaagcgttactctgacaggtttgcctttagaatgacttgttcttctgtcttccactttcagtttcctttctttgtcctgttagtcaaaacatttaatgctttggttattatattatacacagagatccttttctggtcctgcctctctggtgccctttaatgggcatctctttccttagatttgggatttttcttctatggatttattgaaaatctatttgtgcctttgacctgggtttcttcatgtatccctataacttgtatgtttggtctttttatagtgtatcagatttcctgaaattcaggtaggccccctagacgcattccctacagctatgtgatagcagtgtggtgggtagggtagctaacatgcacatggctgtgaagatgtgctatgggacctagaggagctccaggagtagagtcagactggatgtggtggacatggtagttagtaggcaggtgggtggaataagtttgagagacatgccaaaaattcctggttggattccatatgatgccaggatgcatcgggagatgaggtgactggtaggcaggcacactgggcagaatgggtctgggggaacccacatggagttatggcttgtattctaatgaaggattttaagagccagccttaaaagtcttcactcagggttcaaaggagacagtacaataagtgaaggaactaaaatccgagggctatagaaaaagaatcttctcacaacatgttatttctacccacatgctctttattgttctgctgtactgcaaaagtttccagcttataaacacttacaatcagcaattctctggctctagaccagtataatgttagactttttcagggtcatagaaactgataagagttttacacatgggggaagagctcatggacccaagactgacagcttggaaaacagcacaggacagaaccaggccccctgcacatgggtgtcagttaggaggcctgagcagtctatgggacccctggtaacggaacagcatttatacctagtacatgaatggacattgggagcccattctccatggagggatactctctcagcctagacacacgggggagggcctaggccctgccccaaatgatatgacagactttgatgatcctccaaagaaagcctcacccttcctatggagcagaagagggaagggatgggatggggggtcggtggagggcataggagaatggcaggaagagggaactgggattgatatataaaataagattgtttctagtttaaaattttttaaaaaggaaaaaaattttacacaaagtggtaactgccagcctttctttattggtcagagtgggagtggtttaagcttccaagaacttgttaaaggaaaaggtggttgggaggagggagagattgtcattagggaaatccaaaaggggaatgtgtgagctttgctattttcttaaatgtgactaggtaaataagctaaaagttataagcagtgaaaatcaggaacaaagaaagaatcatctttttttcagtgtatcacttttctacagtgtgtggagggaatattgtgtaactagccagcatatgtaaacaatgggagaagtgtgtggcacttgattcctgttagtacttttgccacctgttagctggctaaaaggaatcttttggctctaaggattataccctatgccatctctcaggataacacacaagcagtaaatttcttgcttcaatagacccaggtaaaaataagtacaaagacttagggatttgctttaaggtcaatgtgagattagcttggaacagcaattccctatctgctggcagagtgactccaggacactcttattctctacctctctgagagctatgactcaacaactttagacatgctgtaattcttgtccttgggcatctgtgagtgtctcaattgaggtctctttgtgtggacaataacactgaccaactatctgccaaggaagataattgcagtgggggacagacttctaagtttatacaaagacctggttgagagagtaagggaattgactgtgattactttcttgccagaatcacgcactgctgggggcagtcatccaatataacaatacatagagggaaatgtgtcaagtaaacaattaacatgttgtactgcttgtgggaaaaaacatccccaaactataatgtgagagaaagagctcttcacacaagaaatctgtaatgagacagttaacgtgttcagaaggcagtattgtaacacaaataaataaatgacccagagaccaatattggggttcaggtttcaagctgagtatcagaaaagcaaagcagctggccactagctctcacctctggctcaggctgaatgggctgttcctgtcccaagagctctcaccacgcctccaactgtaacctctcctcagtgtagctggagaatgaatgcctctctgagaccttgcttctgttttatatacttccctaaggttgggattaaaggtgtgagctgtaattctcttttgtgtagatctgggtggccttggactcagagaaatccatcttcctcttaatcctgagtcctaggattaaaggtgtgtaccaccacctcctagcttctggctgctgggattaaaggtgtatgcctgtcttctatggtttatggctgactacttttctgaatcctcagtcaagctttaataaatcataaataataaatcactacacagtattccttattaccttgctaaaaaggggtctattagatgtgcatctcggatggtggtattccttctatttaccttgctaaataatgtctatctccatgagatgtgcatctctgatgggttgccctctgaagtatgtgctgaactctcactgcataactctgtagtgttccacttggttcagtgggtaaaggggctgataggctagagtgtaggcagaagaggtcttaagagatctgcctattgtcccctgccagatctaggtggctcaggttgttaagtagtaggtagggtggctgacttccaggtcaatggaaggaatcgtggtgatcttcctggagttctagttcagattctcctcagggaactgggtagggtggctgatgggcaggcaggtggatggaatggatctagggatcctggagttctggtttatactccaagcagtgtcaggtgatgtggcaggtagggtggctgaagttgagtaggcacagaggttctgatgaagatccctggtgttgtgtgtcagagcctaaacagtacagggtaactgatagttatgtaggctgaacagatatagcattcctactgggagttccatgttggactctgtatggtaccagggtggtgccaaggtaccatgggggtggagtcgctgatagactccagatagtagaatgggtctagagattctaactgaaattccaagtcagactccatgcaatgttgatggtgtcagggccccaatgggtaggtggctattaggatggcaagtagaattggtctgaggaatttacttggagttgtttatcaggtttcatatgatttggaagtggtgaggtgtgtcaggtgacttctaggcagtcaccaaggcagaatgagtggggagaacttacctggagttccagggtgtgtatggaggtggagaatagggagacaacatcgcacacaggtgggcagataggctgcatgggtcttgggatgctatgggagttcctggttgtaccccatattgtgcccgtgcagagcagtggataaataagacatagggacagaatgagtctaagggaactgcctggagctctgggtcagattataaattctgtagtaacagcatagtggatagggtagctaataggctcacagtctttataacagatacaaggacctactgggagccctcagttagacttcatgttgtatggtagtcgcacagtagttagagtagctgcttggcagattgaaggcatcatagggactttgtggttttgcaggatatttaattacactgtgattgttggaaaaacctatatctagttgtggtatggttcagccctggcacacacctttaatccaagagctttctgcttgaatattgtaaacaggattaaataaagtcaaccatatgtaaagagttggagcaagtaatcagtttgcaagaagtgaagacaggattattaagaccctatccaagaaacttatgcagtcaccctgtacactgatttaccaaaaagaggggcaaatggggataagagaacatttcttagctaacttttgaggtacattttgagccaccaaaatcatatatatggctatttccaacacgggtagcttaccatccttgagaagatcattgcttacttgggtgagtcttactcttcacatgggtttctttttctagcaacccccatgctgaagtctatgttaaaatattttcctaaccgattttcactctgcctcatactggctcatcctgagattattttctgcagtcaagttaagaatatcattttcacccaggtagagatctctgaaagactacatcaggctgttacaagtgacaatgtagaaatgacctttgatcttctacccccactgcaacaggcatattgattccctggcaaggatggaaagtatttgtgacgcatagagctaagcatattacaacatttattaaattatgacagttctaaaacttagacatacagacaaaattgaaattacaaaagaagttgcatgataaatttatgtgtgaatttgacaattacacattaagtgtaaatattttaaaatttacatgtaagtgtgaaatttttagatacaattattttaaattattctaatggtttttttgcattttataaaatatgctcattgaaaacattcaaagccagcctgatgtggtagaacacatctgtaatgccaacacttggaaacgggaggcaggaggatcagtagttcaaattcactatcacctacagagtaagtttgaggtcatcctagactacatgagacccttctacttatcaggtatatcaaatatgctgtagtgagaatatgtagcagagatgaaatgtcttaactgtctttatttttgtttcttagatggtttgaaggctttaattgggaaggcttaagaaaaggcaccttgacacctcccataattccaagtgtaagtagactttttttaacgtataaatggtacacacatgatggcatttttcaatccacaaagacttgttttttttttttagagttttatgatcagattatataaagcttgaaacaccatattgaaataatagcatattctaaaatccaaacataatagcaacaaatctagggatggttattacctatatcatctacctttatcttttgaaattcttcattggaattcaaatccactttatccatgaagacaagttaacttttgttaaggtacatgacaaaaatgtgtttgtagctgagagtatacagaatttacagcaactgttttcagtgctgcttcatgcacaggttcacacctaccccagcatgacttgaagccctgtgttcttccctccttctattaatatctgaaaggaggttttctttccctaatccaatttctttgggatgggggcgaggcatgctgttaaatagttagtttgctaggtgaactgtgcacaacaaattaacctaaaatagacttaactgaataaagtgcactgcccctgtttaatacagtatgctgcattttagcaaaagaggaaggggcagatttatggtcctatgaattttgtttatatgcttcagatgtctaggattaactcaggagtctttgtacatagaaacatgttactttctcctaagatttatttctttgttgattgctttgttttttaattaaggaaacaaaataaaaatattgcactcatgcctcacatcactgaacccagttacattcgtggggttttgtctttagagtaaatgtgcagtgttatgatatcgcaagatggggaccttggcagattccatggcagacaagggacaaacatgccaggcagacagagcttgagtgggaagttttattgggggaagggaaagggagaagggtgagagaagagaaagagagggagggagcagtagacaggaaaagtcctgtctgccccttcagaggaacagcaggaaagagagtttgcctcctgaagggacctttgcacctgcttgcagactacgtaatgacatagtagccataggaccctgggctaggcagggtactgccagagtgcatcctgccaggtgatagggggcagactagcaaaatgcttgaatcctaacatggagtaagctagaaggcccaaatatttaatgtaaattttctcaccttaatttatcaaggatgacttttatacactagggttagttacaagggttctgctaaatgccctgaagaccagactttagccaacaaatatggaagaattttgctcaagtttagaacaaatctttaagttccattatacttagaataaacatatttcttagagtcctctcattatactttttaaaaataaacatatgaaacccatcacatagactttcaggacctatgtcctggcttctgcctccttctctggttttacttcattccactctcctcttgtgcaccagtgatggtgaccagtttgttagcttcagagcatagaaccctcttgcgaccatggtgtgtcctctaccctctttattgagcaactattcttaagtaaaaataatagttttgcaatgagattttttataactgctcacatttccctggaaccttgtaattttcctcatagtgttatgattttataattcctaatagacttctgtaatatttgttttacatacacaatttattattaaactcccctgagtgtaagaagcatcctatttccattcctcagaattaccccaaatttaaagcaaaatattcatcccatattatatgttcaaaaattgtcattgaatgaagaatgataaaaatgtgtttaaaacttcgcctttaatcctagcaataatacattcatttccaatactcactaggagacagaagcagatggatctctgggaatttaaggccagcctggtctacatattgagttccaggtcagcagaggctactcagtgagtccctgtctcaaaacaacaatacaattctggcccaatagaaaaaggaaatctataaatttgcatgacaaaatgccacacacagttccataaacagattgaaatcctggcatttgtaacatcatgaatgggactgaagatctctttcataaaagttgagcgattcagacactgaagataaaaggagtacacacgtcagccccatgtgcaatctaaaagcaaattgctcttacaaaggttgacattagaatttttgcctaccagaggctggagaaaatgaagatggcaaaagagaggagaaagagtaatttattgttagccaccaagttaggtcagagcaggaagcagtggtatgactttacatttcaaaacctaaaagaaaggattttcaaagtcgtcctaaggaaaaaatgttcaggaggcagatatatttaatctgatctaaatatttattgaatgacaacattgaccatgatatggtcatggtcaatgtttaataatggagaataaaatctgtagctgacaattccaccaaaaattatcaaaagccttttgttcaatctctcacattgcaggttgcatcacccacagacacaagcaattttgacagcttccctgaggacagtgatgagccaccgcctgatgacaactcgggctgggacatagacttctaatgtatttctcttacctgcttctgccttgctgaagacagctttttctgagacacagctgccagcaaacctgagggaaagagagaagattagagctcggggtcaccatgatgcctttgatcgatgctgctccagtaactatggtggcattaggacttattgcttagattatgatagtgctctttatatgttttatgtttgaacctaaaatagcagttgacatggtggtcctgaagcaaagcctttcaccagtaaagtgatgttttctattgttgcaatgaccttgcttggctctgattatattttgaaagactgtaggaaacacttcaatctagtagaagagtctgtatcttgctagaattaccaagaagaatagagaataatatatttggtacgatagatgactgtggtacagaacctgggctagtccctttcaccaggggaagggtgtggagcctataatgacttcaagccagtgtataatatatatcgtacaaggaggaccacacatctgtgggtcacagagttcatgtcaaaccagtttctttcctagctgatgacaagactgaatgttaccttttctttctgatagattctagaaattggtctgtttaaaagaaaaaaaaaagcacaactgctacggtttctgtacaggcctaccatggcaggtacaaatgtgtttttttggaggattaaaaatgtgcatgataattgagaaactggcatgacaaagtggagggggaaaaagaattcacaacaccatttcatatccttaaaaaaatatattgtgcttaaagatggtcctggaaatgactagcagccaattggttttatttattacctaacaccctcaaactgaggcttaaactagtcccttttataagaataaactcttggggtaggggtgggatagggtggggaagaatgaagacccatccaaaaaaataaaaatgaaaaggtgctatgtctatctttcatctgtaatgtcagtgtctgaacggacaacacagattctaatcatcctgtctagccagagactcaagcattttcactaactttattaaaaacaaactcctgtcatgtcacaatacggtccagggctcagagggaaaggacattataaactagtctcttttgtcttaggcctgaaccatatatatatatatattatatatatatatatatatatatatatagtctgaaagcacaaagtcaatggtattatgacttactatactaaggagttttgtttatttgagatcagggaaaaagacaaaaccaggtcaggaattgagggtcttttccctgaataagtttgtcaaagttagaaggggttagagaggaacatgggagactgatttctcaaaacttcattttatctaaatagagcagaaattgcttgaatttcatgttagctagaaaagacaagatttgaaaataccaagctaactgtctttttcacatgagggaaagagtcatcaaattaaaacaagcatgtgattgacagggccactcttactaagtggcagacctttccagaagctttgttggtaggtagctttttacttatacagataaatgtacgactatccaagatggcatcctgatttggaaatgtgtgttaatagaggtttgctattttttccagtagggtttattatgtagaaattcctattaaaatgtttccattagatcatcacagcctacccaataaatcacatgagctttctttgaaatttcatactcaaaactactttcaaatgtgctatcctatcaaaatatttgaaaacattggaagcctaaaactactgaaagtatatttaattagggtaaaagttcaattaaaactttgatcctgatactattattgtgttattaaaagcctctctccttcataaacagtttctcaagattactagtgtcactgagagatctgtgtattcagcagactaatataaaattaaacacaccagactaaaattcagtgatttctggaggtttatttatcttttaactgatttaaaaaaaacacaaaacatataattccagcattataatcagtgttagatattttttgttgcaagatagtgtggtttaggtatgctaaaggattgcaaggatgttacatttgccttgttattagcaaagggaattgtctctctaatttttcaaatatccacaaatccccaggaatttacatggaccatgtattttgggacttgggttccaggctaagacagcttgtgtgaatatatgggttctgtgaagaagaaaggagttgctttcagcacaatgtgactgtgggctgttttccacttgtgatacatctttgttcatttcatccagagcattaattagaatgtccaacacaatcacaagagataaaggtgaactctcttccaataattgctaacagaaaacattcatcagattttcaacatgaattttaaggatttaaatcttgtcttaatgaagacactagggctataattcatggtcagcttcataaaccacatcttactttctggacttttccatgccccctggtttttccttttcttcttttcttgcactaaaagttatctggataaactagaatagtgccaacttgtttgatttgctaactgactttcttgttgattcttttgtgtgtgggaaatagggctttctgtgtgtcttaaatcacagaaaaacagcaaactgccaaggaaaggacatcacaatatttaattagagtgaatacattagagaaatatgagttttggataattgtaagagttgatttttatacttacaactatctttattatttgaatatgaatcagatccatgtagcatttaaaacaaacttatttttattataatcctcacaagtcataggtttttttcttaaaattggagaacatacatgtgaattacacatgtaaaattgtaaatgattgaatctttctcacttcatttccaaacgatagacctgatggtgaacctaaagaagtcagctaccatattgaacacaagggtattaaaccccactttatacagtagaggtatctgtgcattttccacaacgttttctttcacaataggaccacaacaaatatttatgtaaatagatatttttgggtgatattttgtggtacatataactttttttagtgtttcacagcattatgatttcatttaatttgtattaaataatgtttttaggtccaagtagacttgaatgaacgtcatcattgttagtattattaaaacttatgtcaacaggactgtcactcatctgtcccatagtttagaacatgacctggctatctggcgttgttgcaagtgccttaaactcatggcatcttattaagaaaacaaatttggtgttatgctgcatgacaaagacgaacacacctcaaaatgttgtcctttcttagcttgctgcgttttacagttctttctgctaacaatttataagcctttattatataatattgatgaattacagaaatgatgaagttgttatcttatttctgttcaatgtaccagagctgtgtgtctgttcatgagatacagcgtcatttctgtgaaatgtataaatgtatgtgcaggtcaaattactatatgacatactatcagtctgtatacaggtattcctgttttgctcagctgtgcagactcagtaaatttaaaaaaaaaaaaaagtagtgcagtcaaatcctaatgtatctcattttatagactccattagcaatggtccaacccaaaagaaaaaatggaaatgactgctcaccccacctcgttatgaaaccaatgatgaaaatgtaccttggtgcacccctcaacaaaacaggatgctttctctgagttcttgtatatgcaaatcatgtgtgaggcaagctttcaggagaccttgagagcaaaatgttggaagtatgttgttagccctcctccttttctgcccctgcatcaacagacagagctctgggactttggccatgactcagaggtttgggctttctaagtaaagggacatttctttaagcgtcatctatcaagtttatttcaatgtatgatgtttttacaactggtcagttcttttgtattcttacagctatggttatttgattgtcctcttacaatttgtgctacatgaaagagtcttttgttagaatgcaacaaactgtcatctaatggtcattggccacatgcactcttttgatgtagattaaaaactttttcataacttaacctgctttgatttgctctgtattttccctgcagctgtaattgcagagtgcctgttggatactttatagagttgaaataaaaaataattacttttgaacttatctgtgtttaattccagattagtcaaataatagaattaacatggtaggtaccatgctgaacttgagatgccagttagtcactattaacgatgtataaaacacctgcaaccaagcatcttacatgaaatagcaaaatagaaaagtaactcaatgattcatctttaaaaattcaatgagaatattatcaggccatccagtgtgaagagtgaaacaagatttccacatcaaataagaaacatttgatatgtaaatctcttttctgagcctttgcctcctggattcttccactaaacttcatataataataataataataatagattttgaggacaacatggatgtaaacactcacttctctgaaatgaggataagcatgtgctccttgctcctcagtgcaggaaataactaaccctttaaagctagcataggaattccctcaaatcaactgcttttgtcccactgacatacattgctagtgacagttcctgaaaaacccttaatagaaacaagatatccagtccagttactttctcagtcagacagtgaaaactatctgaaggaaatgtctttttagatttaggataataatctaataattccatttcttctgaaatgagaaaagtaacatgagtttccattacctgcccagttttcctactgtggttataagaatggtcttacttgatccttaaaataattttttaaatgattcaccattttaagggcagtgtgctgtgccactcctgcttatgaatggggtagtggaggactagagacggctgctcctgcacacacactatcacattgcatataaagttcagtagatgtaagtcaccacacagttattcataggcatcagttagagtcaataagtcaatacactaaagaagaaatacctaatattcacagatctccccttaggtttttctcagccttgaatgtacctgtgctagattagtcacgtatcactgtgaacagcgcatgagagagatgaagtctccaatctttaagtcttgatgtctccgttaaagtgtggagtcatggtggagcagaacagtcctcatcatgacatccaggaagcagagaaagggaccagagtgaaatgtagcccctaaggaaatgctttaagtgccgacctcctccaacaagatctcacctcacaacgtttaccacctctttagtaactccatcatagtttggagccatgaagagatcattgatctaatatttatgtcagagccctcagagtgcaacagtatctggaaattccctcacagatatacccataaatatcctgtattaatttcctaaattcttctcaatcaaatcaaactaacaagatttaactaccatatggatataatataggacaggcaacacacaaaaattctttctttcctatctaaagttttttttctgcatttagtagattttttttccttttgacgatataagctctctacacagtagtgttcgtctatgacagctctatttttcagccaaaatcaacctatggaggaaatgatgaattcattcacatacccattagcaaggtcaaacaattcaagctcagtaaaaggaggaaaagtatggagaatgagagaagagactgaaggaagaggagatggaaagagttaagtagagttcccatagaaacctagaaaactgagaagaaatccaatcagaaagtagttgattgtcaccaaatcaattatgccactagtgtatcaatggacacattttgcctggtagtttgatattgtagcatacaatgtccacagctaaatgttaccgttgattccttttttctcccagcaggccaactagtacctaccttccaacactatgaccactactcagtggggaggaaatttctagccctaggctctagactgctaattctgatgcaactagagaagcttcagtataatctactccacatatgtggattctaaaaacaatccaaaaaaagttattttgaaataaccatagggaaggaaagcagatggagattctaccatcatgagaactgtgcgaaacttccaggaaggtcactgggattataggactcctataaggaggaaggttttccaacagatttgtcctgcatcgtttctgttttgtacaaaaagcaattaggttaacacttctaagactgaagaataatgatctataaagacacttaaaccatggcctttgaggaatcggtacattattgaaggagtcctggtctggtatgttgaggaagaagagtttccccatagaactctgattcttgaactaacctgctatagaactttgagtaattaattgtcagtaataattatttttaattttgagatcataatagaattatatcatttcttcttcccctttccttgccccaagccctcccatatagtcctccttgttctctttcaaattcattgcctcattttgctttaattgttgttacatgcacacacacaccagtcctacccacctatgagcctacaaaccataagaatgaaaagcattgacacaatacaataatgacacaataattgtcaatgacacaataatgacacttctgtcttgtgagcaaccaacagccatctgataggatttaaggcccactcagctgaaggacattcaggtctgttactataaactcaacaaactacctgtggccggtgaggtcattcaccctagagaacagcctactactgctactttcctaaagtggtgtaatttctgtcggaaaccagctgacatgttcaaatgtacctgaaagggagagtgaggattaagaaaagagacaagagacaaaagatagagtcagaaagcctctcggtaaatattgcaacagctttcaattttatttcacatagcctttaatacccaaagccaaaggtgagggcaaaagacttccttaccatgatacatggaacaaacaagtgtaattacttccttaattctcaaaacatctagtaaccacaccttagttcaagcatcctgttatctgaccttgaggattaagaataagtttgaactctctgaccttaagtcaagatggaatggagtcaaatctgtgggctcccacagatttctaaccgcattctatatcattttacccaaagataaacatagccctctcaactcatcaaggaagtttctttctgccaccaacagagataattacagaaatctacaactggtcaaaatgcagagaacaactgattgtggggcatctaaccctaacttactcatttactgcacaacacctaaaggcttagggaatatcatcgaagatgggatagagagactataagagccagaggaccaagaagtctactgtgaaataatgtcttccatatatgatggggacactgtgtccatgaactctcaacaatatgttcacccaaataagacccgtacaatgacaacaccagttagttgacatagcaacataaagaggggaaatcttacatggcccaacctagatgaagactaacgtgggatgtccttctgtgtgctttgaatatgtgttgcttttattggttgatgaataaagctgtttggacttatgacagggcagaatatagctagacagtaaagtcaaactaaatacagggagaaagaaggcagagtaagggagactccagtagccatcagaggactaagatgccaggtcattaccagtaagccaccgtccacatggcaatacagggattaatagaaatgggttgatttatatgtaagacctagctagtaataagcctgagccaccagccaaacaattacagttaatattaggtatctgagtgatgattttataagcagctgcaggaccaggtgggacacagaaaagcccctggatacaacaggctacaggcaattaatggctggtgagagaggggattcagtcttctcagggatgattacatgtatgtatacgtcacatccatatacatcctttacatatacatagaagcaacactaagtgacctccacaggttgtacatatatatatacatttacgtacatataacaataataattcaagaagaagacatcatgaatttatgagagaatgggaacataggggaagaattggagaaggcattgtgtatgaaatctcaaaatttttaatttacgtttaaaaagtaaacagcactaaaatcaaaataccaaatgatttttggaatgtaggcaacatgatattcttatatactgagaattcaaaaggcaattataatactgaaaacaattttgatatttaataaaattgaaatgtctatattctacaaatgaagacatataccaatcggtgtattcttttaaaattgcatatattcactagtagatgcatacatcatgttgccagatgcattttaatataggaaaacagatttgaaatcaaactgttaatcacctgaataatggactattaaatcaattgtattcaaatagactttggcagcaataaaatggatatattaattgcatgtaatatgattatcatataaatagtgctaagttaaacaatcattttaaatatattttcttcttccaaagattttcttgatgtgcagaatgtgtataaacattttgccttcatgtatgtgtgtgcctagtgcctgaagaggccagaagaaggcattatggatcctctggaactaaagttacagattgttgtaagctaaagcagggttgctgggaacagaagccaagccttctgcaagagcagcaagtgttctttaccactgagcccccaatgtaaaagtaaataaataacattttttttaaaagtttacatgaaaaaatctattatgaaaaataaattcagttattttgatgaaattttctactagatatatccttttgtttttaatttttattttatgtgcatgagtattccctgcatgaatgttagtgcaccatttgcatgcctgctgcccatagagaccagggtattagattccttggagttcgagttacagatggctgtgaactgccgtgtgggtgctgggaatcaaatgtaggtcctctggaagagcaacaagtgctgttaactactgagccatctctccagccctggacgtcatttttaaaatattccaaatgtgacaacataccaaaggttaatgagcctaaaaatctaagggagaattgatgtggagtgtccttctggacactgtgaatatatgttgctattattggttgatgaataaagctcctttggcctatggcagggcagaatatagcttagtcaggaaagccaaagtgaatacagggagaaagaaggtagagtctagacgggatgtcacatagccaatggggaagcaagatgtgaagtaataaccacgaattccgtggaaaaatatagaatatagaaatgtatggactcagactgtatagaattaagtgatgtcagacaatctcagaaagaaaaaaatctcatgttctctgtttctcctttatatgcagaatctaaccaacggtatatacatgtatgtaaacaagtgtacatgtgggtaccatataacatgcagaaaagaataagaaaggctgaaagttaggggatttggaaggtgatggacatgagtcatgaaagagtgtatacagctaattgtttcccttttctaattcccatagatttgggattttagtgctgggtaacagtataaaatatgtatccgtaaaaaatatatccacagtaaaagtataaaatgtgaagttctacagttccattttgaatagccactctacgttcattgggttgtctgatttgaggggttgggtttgattaatttttatgtatttttgtttgttttgtgctacttttaaaacaacaatatttaaattttctataatgaaaaagaacaaagacaacaaactttaggccctagagcttacagatctggccaaagtcctcctctaacattattagcagcagagggcagagaggcagttctcacggaaggctaattagctttctgcctttatcacttccttacaccctgagaccattcgcggtcagctcaacccacaaagctcctgaaacttgcaaaacgccttccactcacttctcaagcttgcagctgacattgcagttgcttttctggtaaatagagccagttggatacaatagtcttctgagcatgcaggacatggttcaagccaaagatgtgggcagagcataatgacactgtcagtgagaagccagcccaggtagtacaggcctatactcccagcacttagaagctgaggcaggaggattgtcaattcaagacaagtctgggctacaccgcaagaccttgtcccaagcaacaagaggttgagaaaaaaaatcttgttagaggtcaatttacctctttaaaactattcttagagccgggcgttgatggtgcacacctttaaactcagcactcgggaggcagaggcaggcagatctctgtgagtttgaggccagcctcgtctacagagcgagttccaggacaggttccaaaacaatacagagaaaccctcttcttagaaaacataatccaaagtacaagatgtgtgcattgctatataattttatgattagcacttaagttatatctacattttagcagactgtaaatgttgggctgaatgcttaaaaatgttatttctcacacatctcccatcatctttaaatgaaatcgtaatagtgggcacagaattattacctgcctgtgttttttataagcctcctgaataatattctctttttgaaaatggaaaatttgaaattaatgttttctcattgaaacaagtaactttaattttcaaaaatgccttatgaaaatggttatagatgtatgaattttccaatatgttcagcatgtggtacttatagtctgaagagcctaatgtttcttatccaggaatgcaaaatcctggggtttgcaacttaaactaaatgaatccgcatttactgtgagagcctgtgtgccataccccagctccttcgactttaaaccatggtgtcgacactatcagatgctattctactacgtgaagattcaatttatcctatgaataatctattgtgtggactattaagagagaatatttaactttgaaaagtttttagtgtgagaggtgaagttacatacaccatgggaccttcgagggctattaaaacgtcctccaaagaacttctaacataattccaccagggggcagcagaggaacggaattgccccttccagcaggcgcggcagtgaggactcgggtcccttgaagttatcttcctgtgtgtctctgccctccctcttctaattaagtctgatttatttgtccgtgaactgacaccgtggacccacagcagcagtgtagtgtgaagggatttgcgcccaggccagggcttcaacgggattacgctgatgaatttgctaaacacaaagtccacagaagaggcaaacccagcgccctgtgatgccacctggctcaagactgattaggacgggggatcctgaggcgtttgatcttcactcatcaaagagtttttaaacaagcttcatttcacactactgtaaggtggccaaggcttgggactgcagtgagcgccccgaacctaagcaagcactccggcaatgcgggttcctgactcaccctggcgggaagggatgcagccacagcccggagctcttagacccgcccaagggaaagaagccttgctccaatggcccacccgaagttagtttctagcctacagcttgagtcctacaaggtcctaaggcaaatttagaggcggttaagatgtcacacctcaataacatttcaacagcttgggaatgaagaaacaaaatcaattcatccagtctcattcccgcctccctctttctcaaccgcatcttttagaaaaatcaagtccaggatcttaggttacaagatagactcttctaaatcagcaagttcccagagttcatggcagtgagtattactcagtaaaacctacaggcttcctgaaagacatttaacctgaagaccaaaacaaaaaacaaaaaacaaaaaaacgaagtctttccctggaacgctcaacgacaatttttagagccagaagggggcgccccttgtcttcccagtacgacatttacaaatgctagattcaccattagaaagggactattgtcaccctgaagtgtccagtgctaagctccagccctggtttccagtttggtcatagcctttggaagatgccaatataataaagggagtaataaaaggaacccagtgacacgatggaaaatccattcttctctctatcgggtggctttgtgtcctgccttgccggcacttgcctatctttatgattagaaatactaagttcatcaggggctggactcttgactacacagagctttctgagtgccgtgaactccaaaaagacgcgagtagatgcttggctgaggtaccattctcaccagattttagtcaaacctcattgggttctgagctccatgctgttttcatgccaatggccccatcttctgagctgggttagactctctgaagctggatttatccacggagtgattaaaggcaatcactgtgagctcatttgttcctcttgcactacagaaaatctgccgtttcaggggcgtccaaacatcaggaatgggaagtccctgctatttattcaagattggtgcccaggaagatgttggcagtacccaccactttactcagtgttttcttcctgaagcaaaaattaaatgtggcggttgagcttcctttggtttgacaagttgagaggaggaatgaagaggggaggggaagaagacagagggagggagaggaaacaaggaccccaaataatgaaggtgggaaagtagtttgcaagtagcctagtgtttcgttttgtttctttaaatattatttgtctgtctcgtgggttaaaatgatcaatatccaatgctggtgcccaacacttaacatagaaggatggcacacttcacacccttccctagttacacagtacaattccactgtgccaaacatttctcctggttttaaatttattataaaataataactcttttgcaattcctgtggtcgtattagactatatgcaacaagacacacagttccttccagaacaaagcaactacattgaataggcatacccaccattccatcacctggttgcagaagatctccaacttgcctgagacggaaacagaaattggaatttctggacttctctttttccacctgaccagtatgtaccaagtacagaactacttaaataacaaaactgagccagatgtggtgacccacacctgtaaccccaacaatagaggagacattgatagaaaattctcaggtgcaggctactcagtgagacactgccttaaaatgcaaagaacccaatagaaaccaaaccgagccaaaaaaaaaaaaaaaaaaaaaaaaaccctcctgtgtcactgtgtttatcgggctgcctgagactggaaggagtctgccttcagcatactagagagatgctcttcataggccccacggagtgttccttggcactgaaggagcagtagacgtcccttcccatctttacctcctggttttgacagctgggagtaaactaaatcaaaacaagtgttctcaaatgaagactaggctgcactgaaaatggcaagtctctcctcggcagtttgcgagctcactttttcttttcctaggtaacctaaaggtggatattccaaaccattcatttcttactgcagctcaccaagtacggtgtttagcacactctaagacaccacaaatgtggacctatccataccttcataaggagcataaaaactagggagtgccacaatagcccccagtttcatttgtgggcccaagtccttaatgagctaaattctgttcattaagattctgtgtattcatcagggaccattccatcagaatactgggaaagggctgggcctttagtgcagcaatttatgtatttctagaactatctaaatagtgtaagagggctggggaaatacctttttactttttaaatccgcagggcattcattctctactgtccaatgccatatggatttaaactgaaagacagcacattcatcattaacactgctatcaatgtgctgaatgtgacaatatggtccctaagacctcctacctctttattcttctgccccattgttcccagtgtctctgatgatttcagatccactgggtggtaggtctgtgtggagccagagaaatttgtttcattatttacttgccccctccacgaccaatgtttctgatggtcacattttaaacaaaatgttaaaacttcttctttttccaattttctaaccatctgtaggtaaccagccttagctacaccattgtacatattcctaataaaagccagatagatatgacttaaagcatgttggactttcaataaaccacaggaaatcccccaaggtagatggagcttggggtgagaggggacatcgttgcatacagaggtaccattaaagtgaggcaaccttagaagttgcttagatgacacttcaagaagacttctaaaacctaccaaaccagaaaacagatattttaaaatatgtattttttaatatccccccctcacgaaacttcaggattatatttgttcaagactatcattggctactcaagggcctcccaagaatgaatactagagacagggtggtgttgtgaacaattctagacagtccagaagttaagggactacaaaaatacacctcactccaccttcttcaacattgatttccaatcatttatttctttccaatctgacacaatgtttgcttattgtctcacaattatccatctgttcttaaatattattaatgtacatttcttttgttatatcatgacctctgtctcttttagcattgcaaaggttggaacaaagaatttgacttttattatctcagtagattacctctaatttataagcccagcattcttacatactgttgtttatttcacatactgcttgaaaccactgcaaattcgttctctgctttaggttgagcactccttttccgtgaggtagtctattatctccctagagagttactcctcctgtcctgtcctggacgaggtttgatttgggatcaaaagcaagccttctcccgctcagcgatacgaaacactaatgaggaagtcgggagctaagccttgggggtttcttatcttcttctattaacccaccgctgggaaccgggaaccggggaaagaggactcaccgggctcagagaccctgtccgctctgactcggggccactttgatctcacgtgtctgcttaatcaagttcatctactgctgggactgaccaaattcaaagaaccacattaaatagtttgattatcgagtgcccatttccctcttccctccacccctgatctaatttccaaacgcagtctctcgcctctccctctaaactcaccatcaaaagcgaattagttcttcccttggtatcctcatttgatgtgcaaattttcttgtctttgcacatttttttctcctggtgtgtgtgcggggaggggggagcaactagacaaacttaaaagacaagaagctcatttgcaaatcgcaacgctaaagggttaatcagcaactcacaggagccacctggccctttcacaaagcctttcggtgactgctcgagttgtgtttaatactgaatattacttgcttgcacaaaaagcaagggcaggcatgagggaagaaaagtggtttgtatattctatcaccttttaactctgaaaggatttcagacagaaataacccaaccccttcgcaaagcactcaagctcgcagagcgctccctcccgcctttttttttttttttttttttttaattaaagttcaggctaggttccgatgctctgataaccggcactctaaggtgagctggacaaggaggactatagtgcaagggaggggcgaggggagagtgtcaaagtcctcccagcttccgatacacaaacactccccctcccagctcctcccaaagctttgaaatcccatcctggctttgttgtcttccccgaggggctgggaaggctcggagcccgagtataaaggcagcctgaggtggctgtggctgcgcagagccctgagcccagcagcagagactccacggctaaagttcagcagtctggactctgcagttgctgtacaaagtgacctctttttttccggacttcctcctgctcgcgtccttctgaaatgacggttgtgtgtgtagtggcagctgtccggttcttggtcttgctagcagcgatggcattttgcagcctccctctgctcggagccagcgccaccttgaactcggttatcatcaattccaacgctatcaagaacctgcccccaccgctgggtggcgctgcggggcagccgggctccgctgtcagcgtggctccgggaattctgtacgagggtgggaacaagtaccagactcttgacaactaccaggtgagaggggtatcggggatccaaggatgctgtgatcctgaaggggtctcagagaagagggtgtgcagtatcctaggtgtgtgagattgagggtgtgtgttatctcttgggagcagtgcatttggaagagctttagaagaggtagccggggaccgggaaggtgtgggtaccaggatatcagagttgctcaccaccactccgctcccttcccacagtcctacccgtgcgcagaggatgaggagtgtggcactgaggagtactgctccagccccagccgcggagctgcgggtgtaggcgtgcagatctgtcttgcttgcagaaagcgccggaaacgctgcatgaggcacgctatgtgctgccccgggaattactgcaaaaacggtgagtcttggactcccctttaaaccataaccatcctgcctttgagcatccaggaatggaaagaagcactctggctctgccaaagtcaaggcaccaccttcagacccgggtttaccatgcaagggctccccctggctcgtcttcactggcttgtgtttgaggccttggaagtttgtcttcctctgcctccctccatgatctaagacactttacattagaatggacgctcctatggaacaattatcttcggggagccttcaggacacttgagaaagagggaaaggttattttgaaaggagacctagcaggccagccttgacattttgttaacagttccatttttaaggtgactcggtgactcgtggctttgacagactctcgtctctctcaaaggcctctggacattaaaactgttgtcagcctggggctagagcagcttctaaaagagatctctgtcctgcttacatacctagctctcggccttccttctcccttccctccaccctcaactgccttcaaagaaacacgtcccccacaaccacagatccacaaaatgttaatgtctcaaagaagtctccagaaataaactggcagggtggctagcttcctagggcacagcggcattccacagcgaactcactcaatctctgtaatatcgaaattacacagtgaagtaaccggtgggtgagactgtagtcttcaggcagatggaacagccttgcccggatagcacccagagcagagacgttactttaagattactttttaagtgactaaatttctttttccctaccacaaaaggttaacattaaaatagacagaaatatcactgccgacaccaccacaattagtgggaaggcattttcaatggctctcctgggctattccttaccattgaacagtgcactgttgaacagaaagtattggctgtggtgaggtatctcacagtgctacccccacaataaactgttagcagcaacaccttatagcataggactaatcactatctctggcttccttaggaatatgcatgccttctgaccacagccattcacctcgaggggaaatcgaggaaagcatcgttgaaaaccttggtaacgaccacagcaccttggatggatattctagaagaaccacactgacttcaaaaatataccacaccaaaggtagggaaaggctttaagacccagcgtaagcgttaccagaagcatatttggagttctcttaacgggcctagcagtaatagccattttcctctgtctcctccacaggacaagaaggttctatctgtctccgatcctcagactgtgccacggggctgtgttgcgcgagacacttctggtccaagatctgtaaacctgtcctcaaagagggtcaggtgtgcaccaagcacaggaggaaaggctcccacgggctggagatattccagcgctgttactgtggggaaggactgtcttgcaggatacagaaagacaaccaccaagccagtaactcttccaggctccacacctgtcagagacactaaactgactgtctagatgtgatggactcctttacctaatatatgctgcgaaagcctttatgatttgtcagctcgatcccaaggatgtacaaatctcctgtgtagagctaagcattccgataataccttccaaaagtccggagtgtgaggactttgtttcttgatggaactcatccgtggttgcagtaaattactgtgttgtaaatcctcagtgtggcacttacctgtaaatgcgacaaagcttttaattatttttctagaggtgctacatttgtcttgtttcttttgcatgtaaatttttgtacacattgattgtcttgattcataaatattctatattgaagaatttcagcttctagttcctaagtgtgtaagcctttctccttttatttctagagtgtaaaatgcaaagagttctaggaatagccagtgatagacatgtaaaatttatcacggaaatacttgtttatctcctgagatgtactatctttgcttagatagtctctcttcctctctctctgtctctctgtttctctctgtgtgtgtctctctctcagctgccatagtccttgaaataaaatttaacatttaataattataaaatgttacaatcatagatacattttgtaactgtgatcttaggtgcgagtgtgggtgtgtgggtgtgtgtgtgtatgtgtgtgtgtgtgtgtgtgtgtgtgtggtgttgattgttttaaaatgacaagacatatgtctatgtgtgagtgactttaaagagaatgtattagacatctataagctcaaatggttatggtaatatgggattgaatctgatattactattttcaaaaatacttttctaccaggtgtggttggtggcttatgcatataatcccaggattctggaggctgagacagaaggaatgcccatgagttcaggtgcatcctgtccaaaccagtgagatccaaggaaactgctgctactgaatgatgctctgtctcaaaaacgcatcaataaaaatagtttccaacaaattaacatttatctaaatggccaatagttattggaaggaagggaatgatcaagaaagtaattctaaagtatgtgatgatggcaggatgaagaggaggttctgtggaaacatggtgaacaaaggcacgccaatttgagccaactaattaattcagaatattttagatacccatgcaaaagaattgttttaattgccttgatttaaaaataatcactaaacagccataaattctagaatgtctggctttttattctcttgtcaagtgattatttcaatttttgcttcacctgtatttcatttattagaatgagggtatggatgtgtagctttataaaaatttaatatgtatattagatttatataaatgtaacatataataactatatatatatatatatatatatatatatatatatatatacctcaaatctaaattctctttttatctttcccaatttgatctttctgttgggaggacaaaacaacctttgcaatttatttattttgtagtattctgaaagtctacatcaaaaaccacaaaacactggcttcactatttaaaggatagtagtgactgactgactgtgccaaccttttttccttaaatagtacagatgtcctagaatattcattggcttttgtgctcccggaagtgattaattttcaagggagtcaggcaacaccacatgcactctgttggctcactaagaggagacctgacaggatgtctgtgaccgtgtcccttttgtccatgagtctctacttcttcacctagagaaactcttactgtgttgattgcctgatgtgtggggtaaggcaatcctgaggcctgttatcttctacaaaacacaatagtggagggaaggaatagtggagggaaatcttttcatgaaacaggagaaagcaaacgcttccaggagagcagggcagatgctgaatatgctctggtgaccggagcctttctgcagggtccagctggagtgaagatgtcctcctctgcatatcacatccactaagcttaggttttagcccttcctgctgatcttcggcgtggggtcagagagatcaggcaactgtttcttcccatactgctgggaacttaggactatactaagaaaagtctacatatttatgaagacagaaaaaaacaaaagtgtaggtactttattaatggaagactagaagagagaagttgtatacaatgcaagcccaaaacaggatctcagggaatccagaattagtatatgagagctggttcaaatgtcttgtggtggtggttaactcctaaacaatgtatctgagtgcttgcccatgtgaaaatttcaccagctattttaccatttttagctcgcataggctacacactgccttgaactttgatctctttgctttgagtgtcttgactgttgttctatatgacaaaaggaggtgacctttcagttgcttgcattatttatggtctattctctgatttgcttagccaggcactaactgacaatcaagtggtttccagagttattgctttgacaaatattttctgctgtgacataaattcctccagtatgacacagtatagttgaaggataatgactgagtttgggcataaaatttgaaatcaaatactgtgatttttttttcacctactggaggtatggcgtcaccacaatgatgtgattcctacttttgtggtgataagcttttactaaaatgtcttaaagaggaaaaggaggatacagtttttcttaaaagggttatagtaagcatcagtctcttctcctagaagaaggctgacttgctgtaacttcttccatatataactagttactctgaagccacaagtccctcaccttctcatgttcagttggaagacttaaaatgttttcttcgttttgaaattatttcttttatttttaatattataattacatcattccatccttttccttccctccctacaagcccccgcatatagccctccttgctctctttcaaattcatgacccacttttttccacttaatttttcttactcacatatatgtacatacatttatattcctaaatgtaacctgttctgtctgtataacattacgtgtgcgtgtgcgtgtgcgtgtgcgtgtgcgtgtgcgtgtgtgtgtgtgtgtgtgttcagggctgtaaatggtttaatgtgatgacaggaacaagagtaggagacattgtctaaaagcataaatagaggcagcagaaatggctaagagggtaagagagcacacactacaagcatgaggacctgaattggaaaccccagaaactacataaaaatctttcatggctgcacattcctagcattggtgggcagtgtggcagtgacaggagtggtggggaaagactggcttgcaaatcctaagcgccatcttcaccactgagctgtgtccctatattccagcccctaaatgcataactgtctttggagagtggtggcagccagccccatgctaatataaattgttagagtccacattaaaacaaagctaaactgtggaaaagacatgaaacatgactaagcataactcaacattacatttcacaactttctcctcatgggggaaaaaagactttttaaaagactctcatattgaaacctttcccatatctgtgacactctgaagttcagattaaaagcagatgagagaatctgggtgaaccatgaggggttttgttgtttggggaagatttcttcaagcaatcactgtttcaagtagcacagatgtttctttttctttctatgaggaagatcagggacccaagcttatcaaaaaattaaagaggcaccatgtgtcctcggagaaaggtgagtttgccatagttgtttcacacaggttacagaaatggaagaacagggaagtactaacatgtctggtcacctgacccacatgtatgtggtagcatctgactctgttgtggaagccatgggtgttggtgtgggttgtcttttccatgtgttgaaacctaaacctaaatcctagaagagatgctgtttgccttgttaaagtgctggctgtatttagacatcatacagtggtttaagatatgttatttgagtggactaagatgacatagtcactttgccactgctgtgacagaatgctggactgaacagcccaagagaggaatgatcacactttattctgggcacagtgtcacaggacattgcagaaagcaagggtgctttgtggaggcaattcatttttgtttttctttatcacttgtttttctcatttgagagagggtttgtataccctagactgtcattgatagtcttcaacccctgatccttctgactctgactcccaagtgcggggtaaaaactatcaatgttgggcaggaagcagagatcggaagtggccggggataatgtaccaccaagagtctattcctagtgacccagttctttcagttagaccccacattgtaggtttctccaacctcccaaaatagttccaccagctggggatcaagcattcaaaccatgagtctggtggagacatttcataggaaatgaagaacagatgaacacacagcattctgaatattgcctttccttcttttctttttcctttttccttttccttttttttaaggcttgatgtgcctggtggccaaaatgttaatgactagtttactacctggctcacttgggacagtcacattactacaaaggaagcatattcctcaaatgaactagatagcattaaaacattcactgtcggttttagcttgctttttgtttttttgttttttttctgttactgtgataaaataccccaacaaaagcccttatggggcagggcttattgtgacttttagttctagagggatagtccatcctggcagagaagacacagcagctgggagggagggtatggtgatgaggaggaggctagctggccacattgcattcacactcagaaagctaagtgaacaggatgtgaggataggctacacagcatgaagtctgcccacactgacccacttctagccatgctccacctcccaaaggtctcagctctcccagacagcaccgccaactgcagaccaagtattcaggtgagcctatggggacatttgacattcaaacagcaatacctcttaaacccctttaagggaactatttctaaggaaggcagtaccagtctgaaagtgctgctagtttgctgcagagagtcatgtgctttgggtactatgtagaaggtctcttcatgctagttaactcaccttctgctcagtctttttttgaagtagattggtgctgccaggagcatgtatatctaacagtcatgaaaagccatatgttattaaaacattaaaataccatattctgtaggtctcttaagtgtttgaagaccatctgtctaaaatatctctatttgaacctgaaaacatgctaacatggccacaaatttgattgtcatagatgactaacttctaacctgtatttcttaattatcctaaatagtttgtaacaacaacttttaaaaccagaattatacattacattttaaatgaggtgtatcttaaacaagggtagaaatatatatatattgttttcagtttaaagatagatttaataatctaccttttatcctatcatttctgtatatccctttttttttatctttttaggaaaatatccctgaatctgatcttctttgttaagtttgttccctaaccatgaccagtaacaacttgtaaccaactcccctaaacaaggacaaatatccataatccatcaacaaaccaaaaccaccctacctgttggtaatgtgggcatcatgttttctagactccttactgttgtctgggaacaatggcatcttcaggggaccctgagaaaattgggataatggtcgtcctaggagggctagctgttttgtttttggtttagtctctgtgtgaagggaacatgtagaacttatctgaagtcttggctggagcagtctatgaggctgaaccattttaactttgaagttgttctagatgcagaattttgacgaagctgccacagaggcaatctagaggctggatcacctgggttacttgtctttattggtgcctggtcctattttctttctgaaaacacacaaacttttaagggtgacatatgtatccacattaatacaaatgtgtggtgtacacaactcagctaaaaatgatttttgtttgttttatgtttgagtaggttaaatgcatcagccaactttataagtccattgggactgtataacccaattgcaattgaaatttctatccatgccatatgaaaggatggcatgtaatcataagtcataaggattctgtagccaaccagagtcatcatgtctcattcagtctcagagctggtctcatgtcgaaggatcagcatatatcacctgtcctgtagtctttcttggcttttcccctcatgtctgtagccaagatcctcaggaggtctccccagtccaatccgaccttgattattttttaaggaatccataactttttgtttcctatagaaacaaaagtgcaacctgtatctcaacacaacacagaaaaacattgacttccattctgaagccaagacattccaaaagtatataggttggtttaattcggaaatccctttcacaatccaacgactctcagcagctgtcattctctatacattagcgttcaaaaaattcaaaattaacaaagtaccatattaagtccctacgtggcttatttttctatatttctttattttttctttaaagacttcattatttttaaactgtttttcatatgactatctatagatattttttttctttctttggcacataagcacctttttaagcatactatacctttttagaggttttctgtgtctggatctggctttactaagaacctgcagcattctctgtcctatgagccaaaccttaacctgttaagcactcctctgcttagctggtttagcacaaggcctggcaattggctccacctgctttgggttggagagtgaagactcatgcctatgagcctagcttggagcatcaatccgcctagccctgggaagtttctgggtcctcactgcagtaggcatttctacctagtctcctgccatttctacatagtcactgcccacttttcataaactctattcaagtgctaggtagcaggacctctttttctattcttttttcttttttgttttgttttgttttcctttgttttttcgagacagggtttctctgtggctttggaggctgtcctggaactagctcttgtagaccaggttggtctcgaactcacagagatcctcctgcctctgcctcccaagtgctgggattaaagtcgtgtgccaccaccaattaaaagagcatgatcactgagcctacccaggagactgtggtcaccagaaaattttttcagaccttatgtgggtttatatgctggacactggcaccaaatgcagcaagttttcttgtcggactttctttggggacctccaataatgacacagaagtttataaagtaaatgcttctaagttgccttcaaatactttcaagttaaaaatatcttaatggtactacaaattcctaaatttaaaatttaagcaccaagtagctccataaaagatagttcagtataactatcactttaaaaagtcttatcctaacccctacattattgtgaaaactcaatctttgatgaaaaccaaacagggtttttgtcaatggtactttgttatatacaaaatgaaaaagtgtaaattatatttgcaattaattctgtttggtctactagtttagtaaattgaatttaaaaagtagaatttaaaggaacctattagagtaatgtgcttaggaaaacccttcagagtcacacagcagactggccacaggctctgctcttatagagatccaggtttctgtcttggctctatttatagtgtcctcagctttatatggagaaacctgccttgcaatcttgtattgaatacataaggatgagaaaacacacatgaaaacattgagcatgcatcttgtcagggatgcttatacagatgtttgttcatgctggctgccaaaaagtattttcaatggatttggctctacagcataacctactattgcgtgataaactttttgtacactataaagatgtgtctctgcttaaggtgtcttctgattggtttaataaaaagttgaatggttaattgctaggcaggagaggataagcaggacttgtgggtagagtgagaactctgggaagaagaaaagcagattcaccagcaagacacagggaaatcaggatgtacaataaggagatgagccatgtggcagaatgtagattttaaaatgtgggttaatttaagttagaagaagtacttggaaacaagcctgagctaaaggccaagatttcataattaataataaatcttcatgtcattattttcatgctggtggcctcacaaagggaagtccaactacaatctaccacacaggtcctcaaattgtgttcacttcatgtgacatttcacaaattaaacaactggtcaaagaggtatactgcttaagtccagaagtcagactttgaaccgtgactagcctttttcttctggaagaatctagtagataagaaccgtagattctggagtggaatctaaaagattagctttgaaccttatcaagttgcttaaattccctaagcctcatttactttatcagtacattcagaatagtgggacctcaagtagcctatttatgaagttctgatagtcctggaacataatgactacttgatagatgctaactaaatgtaaagtgatcttaaagtggctaatcttaaaaagttaacctctccccttgtaacttcatgagattacatattttaagcaaatttcaacatgttggtgatgattacacttggattatttgaaagtattgaacttgccttaagttttgttttttggaaaaatagtataatgagtatcattcacataaattcaactaccaaaaaaaaaattccaactgcaaacacaaaccacatcactgtctgtttccagtgtacaatttgctaaaaagcagtcaaagtaaactgcagatatcatgcaatttccccaagttattttagtaaatattccctgaggatgagaacctgtttctatataaccgtgctaacattattaaccataataaagttaacttagataaataataacacttcatgtgaaatctatattcaatttcctgagctatgtccaacctcacctctctactaccacacaggtgatcattgtccacctttaattttggacctaataccaaatcacacattgcattcggttgccatgtctcttgtctccttgacaaagaaataaaacagccttatttatattcttatgttactgcagtttaaaaagagtttgtcatatatttgacaacagttttaatatataatgtagaggtgaaactgagtcttgtgtaacacaggatagcttcaaacttgcttttaggtgaaggtgaccttaaacttctcatcttcctgcctttatctctgaagttctggagtcacagaaaaagtgtgtactatcatgcctagttaacaattttttgaattttttttattagttcaaattaggaacaagcttgtttcacatgtcaatcccttctccctctctctccccaccccctagctaataatttaaatgaatctgataggttgccatgtgatgatttctgattgaatacttttgacatgcatactacacagttgtaactttcaatattgttacattagcagacctgctacgtcagtttgttgcattacagatgtgaagtttgattacttggttaacatggtgtctactggtatgtaccagattttctatcgtaagaatactcttttctgtttgtgattaatacgtagcctgtgggatgataagtaatatcatattgtcattaaccttttgagcaattcatattaacatttagtgatatttgccaatgtaccaatatgatttgtgttaaatatatgtgtgtgtgtgtgtgtgtgtagaaaaacatgaggtgggaacgctcctttaagaaagttctagctccttgtctggaatagactaaagacaaagcaagtctaaaacccccaactgtgcccaaaacaggtggtgttcaagatcagctggccattttagaaaacacagaagttgtgtagaggttcccatggcaaaattcagaaaacttgaaaaccatcattacaataacattccattgtgttaccaacttccattctagtctgctctctattgctgtcaaaaaacactgagggggggggcaacttaggcaatgaaagtgtttatttgacttacatgttcatgtcacagtccaccgctgaaagaagtcagagcagaaactcaagcaggaaccaggaaacaggaagtgaagaagtgcttactggagtaggaaccaggagacaggaagggaagaagtgctcactcaagcaggaaccaggagacaggaagtgaagaagtgctcacatggaaacatcactcactgccttgcttcctacttctactctgttagcttccttgtacagcctaagagtatttgcccagggttagcaacacacacaggggcctaagccctagtccattaattaacaatcaaagaaaggtcccacgagcatggccgcaaagctaatctgatggaaagaattcctctgatgagtttaccttttcctaggtcattctattttatatcaggaggatttaaaaagaaaaaaaggacaaaatgtgcttcagttctgagatgaagtagttgaaatctctatctctctctgtctctctctctctgtgtctctctctctctctctctctctctctctctctctctctctctgtgtgtgtgtgtgtgtgtgtgtgtgtctttaaatctatcatttggtctggtagaagaaagtaggaggagactggatattaaaatgttcagaatgcaagctagtagtcacataatcagaagaaaacaatccatctctttcagagaaggttaacagctcgaaaattctgctcagagtttcactgaaggtaatctaaggaagagggcagtcacagacatgtcataattaagcaagttccagagagagaattgatacatctgcaccctcacaggaaaacaggcaggaagccataatgattccctcaattacctatagtaagagccagaggataggggtgggaaaatgaacaagaaaaatacaggagggagtaaggaataacccattgagaaataaacattgtgtgtgggcatgaatgtgtgtaaaagcagtaaataggaaagttgattacaagaataaacagacaattcaatataataaatgttataaaagaatcatacaggaagaatggtgtgtggcattcaaactacccagggataaggaacttattaaataggaagagactataaagtttgtagcataagttatttcatgagctattttaatacattgacaaaacatatacagattgaacatgcctaacacaaaaaaaatcaaaaatgaaaaacattctaaaatgtaaaaatttctaaacactaagatgatgccacaagtggaaaattccacactggtatcatatgctgtgtagttgaatttctttctcgcctggtctcacagccatttagccccaaataaacacacagagacttacattcgttataaactgattgactgatggcttagacttcttactggctagctctctcttaattattaacccataactactaatctatgtaattccacatggacttatcttaccagagaatgcccaagtttcctaccttcccagtagcatctgcctggcagctcctctcttcatcaccagaattttcctcttcctctggcagccccgcctatacttccttcctggttactggacaatctgttttattcatcaaacaataaaagaaacatatatacagaaggacatcccccattaatgctgagtcacaagcaacctacatgtgcaagaaaaatattctatacaatttacttttggattatatatattaggcataaatgaagcattaataaattcagagtttatgctgaagctaaagttttgtgcccacaatgttatcttattttgaagatactcaatcttttaaaaaatacaaattcaaaacatttcaaccaaaagataaaaataaaaataaatcatgccggccagtggtggcacatgcctttgatcccagcactcgggaggcagattgctgtgagttcgagaccagcctggtctacaagagctagttccaagacagcctctaaagtcacagagaaacactgcctcaaaaaaacaaaacaaaacaaacaaaaaacccaacaaacaaaaacatttctactcataaccattaaataaagaatattcaactagtaatattaattcccttatgtttctggatgtggtcaatatcctgttgatacaaacaagtccaacctgcagaaatttagggtaaaagaagagatggaaatggattctgttaaagcagtatggcacatcaggccattgagcactgtttgcctgcctactgtactgtctacagccgtgtacagatgcagtgagctcacttactagaaggaaagcaacctctctctatgttttagtgtcttttctgttgctgtgataaaatgcattgacaaagcaatttagggaagaaaggacttacttgactcacaattccaggctccagtccattatagtcagcaagtcaagacagtgggaacttgaacattagtccacagacaatttatttagctatttggcttgttttctctactttaaacaattcaaaatccaccttctcagggaatggtcctacccgtaatagacaggttttctggcttccattaatataatcaagacaacaatccagaggcatgcccagataactttacatgtgtcaagttgacaattgaaactaaccatcacaccctaattaaagaatgtctcctacatttcaatccctgtctattcaagtcacaaatccagctaattttatcaacaatttcccataataattttataattttgattggcctgagtattatagtttcatgtgtgtctcaaatgaatcagtttgcatttcacacctacatagactacactgtgagtttaggttccttagctcacataggggcaaaaacttgacttcctctcctaaacaggtttgctaacatggagcaagcctcagtgcatcttccagtttctgtttcagtcgtccattggatacttagataaatactgcccttgtggttaatttcccagtgtttcagaactgcggaacttgtgctgtatgctttggaagaatgaattattacactgttgccagaaccttctgtgccagcctggtctttgcaggagtttgcttagttgcttgcactagtttttccttttaaagctccatgtacacaagtgctgtttgcagtttcagaaagcagcccagtggtggatccccatcatcagtgtaagaatcaccagggtactgcctggaccttctttggggaatattattctatcactaagtatcgtctaaagtcctcatttcactaaacacatttgttttcattgcagattaacaacaaagcctctattttcacttgactcatgaggttgcagtcaggaaatgacttctaaaacaagtggaatatttaacaaatgtttattaaagctccagggaaaattatgatttttctcagtgatgtgtatcagaatcctaaatactatagacattgaactaatacgcagagccctccgctaagagctctgttctttggcctatgagaggagtacacatgcagcccaagccagctgctgcacatttctttctttcatcattttatttccattaatctctgagcattcaacagccttttccagccccaaactccaaaagcccgccataattttcacaaaaaatccatcattgtcaggttcatcacagcaaaatgagaaaggatgaggctagagtctttgatgcccccgaggaccttacttgtgtccatcacacacaactcttaagggtctcagcacctctccaactgagccacagttagtggcatgtcaacctctggaggataattccaaatccaaactatggcaggtgctgtaaagagaaggtgttttcaggccctggagaaggaatcattctcgggcttacggaaggggctctccagagctcttcttaataggcaaacgtttctgctaagaaaatatccttactctctgggaactagcacggccgagcattggtgctgtttcatatgaccttggttttctggcacaccgagggtctgattctctggaatgacttgtggaataaaacttagcaacctcaaaattctcaagcttgtactttctgaaaagtaaagcagtttggatacccccttcagctcaaatagatacacatatccattgcactatacaaagggaaggctttcagaaaagccgtagaaaccaggctggaatgtttgtgtggtgagtgaaggaaatggaggctaaccggcaccctaagtctacagcactcttactcggtagggcagttccggtaggtttgtattttcttgctgaagactacactgctcttaaataaacatgattacaggctagaaaagctacagactgctccaggtgctaaaaataaaatagttaaaatggagagacttcaattagatgccggctgctcaacaatttaacttccaattgccttgtggttattccacaagtgggcattgaccatattccatttacaggagactggaggtctcagagaaaaataagaaatgaagttcttgtcttcaaatcctgatttctagaaaagtgagcaaaaataagcatatttctactctaatagaaaaaaaaaaatatagaatcgcaagtcatgtcagaattttctcctctcaaaatagttgaatatactccgactcaggagaggacaacagacttgaatattagtagtgctgtttccatcaaaatacaacgatgacaaaagtaagtgttttccttggagttttccatttgttttgttttcagtcagtctcacaaggtagatgatgctagccttgaactccttctggccccacctcttaagtgctgacattacaatagtccttaataaaataaaatgtatttcttttttttttagtttccacttcactcataaaaagccaattatatatttatcaatatggtaattttctaacttgattttgatagctttagaatatgccattattttataaagtgaagcattctgactctttgtgttttatttggcttttgatagtgagttgaaaataagcaatggatcatttgatatggtggtgaaaaggctatttttaaagtgagcattcaagtgaataatatagaataaatacacatgtataaaaaaggcaattatatatatttatagctggctacccccagacctaaattcatagttatttgaattcacataacacttagatattattagcagtcaaatcacaagtacactgaaataaagtctagattactgggtggggtctgtgaacagagttttaagcaactgaaatgagtagcccagttctgaacataatcttcatgggatgtttgactgactagatcaccttgtagcctccctagctaccctttatacattaacgttactaacaatttcaatcttgcttgccttttccacttttactttcttgttttagttaggatatctctgtgtcttgctatatccaacatgtaattactaagttttcaatatctctctgtgggtggctatgttttaacacgtgtacatattgatattacatgtaatataaataaagaaagagccctaaaatcacaggtaggctaaagaattgtgatatccagcagtcgtcccaacaatacacagctaatattgaactctggaggtagcctccagaaagttatatttgtatagaatttcagacaagtaactgttggtgagatggctcaaagattaagagcactggccactcttccagaacacctaggtccaattcccagcacctacagggtggttcacaaccatttgtaactctccagtatgccctcttctggcccccacaggcaccaagaacacacatggtgcacatacatacatgtatgaaagacatccatttacacaaaataaaatgttttcaaattgctaaaaaaaaaaaaaaagaaatgtgtttctaaatttaaatcctccctattactttatttttcaattgtgagcatccattcagtcaccaaatctaaaaattaaggtttaatcaatattcttaatttttcttcttcatccatataatacattgctcatggagtccgggttttaattacctctttatttttgtttctgctgccacattttgtttcctttggagcattagtgacaccttcaagtgagttcttgattttaactttctccctcctcatctataaactagttgaaagtgtttgtgagttggggtgtgcacaccacctccggtctcatccccagcttctcatttatttccaaagtctcctctgtctcctctcttactgctccatcagccaaaaatgacttcctcccctaactaagtcatctctctgttcaccgtttctattcaggtttctccactccagagggtttccttcagtcctagaaaacttgtcatgccactttttctgaccagcaaacttttctaaacaaacttgaaagcaaagtaaagttatctgcttggctattgctaagaagttgtctttttgtatgtggtacactccgttggatgccagtaattggctaaaattcatatgatagtgattggctgctctctgactatttgacgtttgtacatacacccttagggctcaatctgttaagtaaattcagttatagtttacctccaggaaagagaaggcctccaagacagccaaacacaacaaggcgagacacaataagacaaggcaaaagccttcatattgaggctggacaaggcaaccaaataggaggaaaagaatcccaagggcaggcaaagaatcagagacacacccactcctactgcttggagtcctgtaaaaacactgagctaaaagccataacatatatgcattctacctggcacagacccgtgcagggcctgtgcttgctttttcagtctctgtgagaccataagagccctgctgagttgatcagtgggccatgttctcctggtgtcctccatcccctcagactcttacaatctttcctcccactcttctgaagggttccctgatctccaaaggaacgagcccaaagagacctccaatttagaccctctttcccaataatgcagggctttactcaagcattctgtaccgcttatttcatcaactataaaacagagggaccaactgtattactgcaagtttaattcttacttcactcaagcactctgtattgcttatttcatcatatataagacagagagaccaactatgttaatctagaagatcaattgtagcttttatatttccataaacaaacagaaaaatagcattttagaagatactgcaaaacaccttagggcgtttttcatcatagatgatctgacacttcctgcatgtcacatccacctttatttcaacattgaaatttcctaacaatcaaatcatgatccgataaaggctcaagttagtcctttcttcatgctctgtctgacactcacctaagtggagttaaacagagtctgaattaggaagcttaaacacctacatagctgtggtttatccagttgtcctgtctgcaacatctaggatgttcagaggtcaccaactgaggtgccagatactatttcccccttcataattctattttagtagtataatcccatcacacccacattttcaattttcatgtcttcatcttaccaatttaaataagacatatgtcttaaaatccttcgtacacacgtttattcttcactccaatttgattctaacctactatctttgatatggagatttattacaaaagctcttgtaaccccttgaattatttctggcttctttgtactctattgcagtccatactcgtttctgttcagtctccaggaagcaggattatgtgactatagccataaactttaaaaattgtgcagtgtgtgtgtgagtgttaagtatgtgtccatgggagtattgtgggtacatgtgcatgtgagtgtatgcgtgtgtgtgtgtgtgtgtgtgtgtgtgtgtgtgtgtgtgacgtgtgtgtgcatgtgagaatatgtgtatgtaagtatgtgtgtatgggaatatgtgtacatgaaggtgcatatacatgtggtgtgtgtgtgtgtgtgtgtgtgtgtgtgtgtgtgtgtgtgtgtgtgtgtgagtgtgtgtgtgaatgttctgaaccacacagtgtaggtggaaatcaaaggaaaatttcaaggacttatcctggctttccatcttatttgacaatcacttgtgattcaataatgactaagccaggctagctggcctacacccctctggggattctcttgtctacacttcccatctcaccttacctgttgctgggattacatatactttcactactgtatcattcttcctttacctgagtccctacacttcacatatgtgtgataagcacttcacccactgagccgtgtccctagttccaatcttcagctagacttttatatcattaccccagtatttgccaaatagaccttggcattttaatcaaagttggcaaataactgttttcaaagaacttctgagtctttctcatttatcccctttgctctttaaaacaaatgtgtatttcgctgggcggtggtggtgcacgcctttagtcccagcacctgggagacagaggcaggcaaatctctgtgagttcgaggccagcctggtctacagagtgagttccaggacagcctccaaagccacagaagaaaccctgtctcaaaaaaacaaaaacaaaacaaaacaaaaaaaccaacaacaacaacaaaaaatgtgtatttcacatcattcccctttctcaaatataaactttctagaactctatccactatccataaccaaagtgatggctccttactttgacccaacataatactttatcagcattatacctgtcattttgtttctttggtgtaaataacataagccataggtgtaaataataccttgatgcacttgctatgtgaccattggcaaggacccaagttccacagactcatagatttgcttgcacaatgatacataagggaggtaaaataataccttggaaaattattgtgaggacaaatataacaaattttatagtgatctgtcctgaaatatcttagaatgagtgttgctatcataaacacttaatgaaacattaacaaaaataagtaattaaataaggctcagtaattgttaacttggatataaagactagaaaaaaatcatcacttcagaaatttatcttcacaagtagttaggcacctactactgtaccaagaatgactgcattgtatagtcttaggggcttttctacacaaataaccaagaaatgacagttaccatgaatctgcaataggaacaagcacatttttaaaaatcagagcagaaaataagtagcctacacttgccaactgtcaacaaaatgctaactggcttgaatatttcttggtttctgttttaaaaacttgagggctaaagtactaaaatttatgtccccaaaactaaacatagtaagacacaaataacagtgcaaatgttttggttgtctaattcatgctactttggctgacagaacttgaagaaatagatggtgattttctgggctgtttttggcctttggtgcatcctgcattaggcaagtgtaagacagagcagcatgaagggctgctctgattaggaatgttggaacggggtgccagccatagttcagaatttgatgtgaatacagcaaatgaaaaatgccccccaggagagacatctctcagcaaaacaagttctgtgatcatgacaatactacaatgcctgcagccatcattccaaacaccagggagactcagtgataaagggaactggagaacaagcaaaagaagactccctctggtttcagaacgggacagagtctacaatgaactagggaaagtccagtgaatgatttacccaggcgatctttcctcagatttggccctaacactttcatctccagtttctgagtcaaattgtgttctctgtaacaattctatccaacgtcctgtcttcctgtccctttagtgcatttagaggctaagcactttctgtaagaagcatcattattcacttgtcagtcttaaaacccaaggcagatttttattgtaatatattttggtaaattctccaattcttcatatctaatgcattctaaatagataccctacaaaattataataaagtataataaaatagaatttgtctcttccttctttatccaaattttataaaggttctcatctttactctagggctgttgaatgtctaagaaaactcatgcacccttcctgaaacctcagtatcactctatcaacccttgtcattatttttaaggcattgtctctcttattgtgtgccagtgagtatatgttagatattccacacgatgcctggagcaacaaggttgggaaatgacacaagcattcacagaacaaaaattggagccttcagaggaaccatttaattcagtcaggagtctggaagaatgtgtagggaaggacagcccagaggagaggactcactgggcaagtctcatagaattgagaagagacataacatggaaaaaaggtcaaagagaaacacaggaaaggcccagaaacgaaacaaaactattaagtctgaaaggtataaaggactctgcaaataacaaaatcagtggtggttgggaaaaatctggagtgtgcaactgctgagaaactgggctggatgttcaccaaaacctggtggtcaagagctctgaagtttggagttagcaggttacatctcaccttgaagaaaactgagtaacaagcatttgaggggaagactgagaagctttgggattatgcagaagatggcagctcatcacaccaaaggactcatgaggaacaggaacctgcagggagagagaggcctctcaaaaaaccaaggtccttcgtttctttcacccagtcagtgtggtttcacttagttcaggttcagtctttctatatttaggaactgtgacttttggtcaatgatggttactgagatctaaactttggcctttgatttagaattcttcactcagttttgtactcagtgaaaacctgtaaaatcctgtgaaggatctaagagctagctgttttggtcactgggtaaaaattaatgaaagtgaaagtgtaaccaggaagaactcctagactctaacttgggctgtttcagacaaatctctttgttttgtagcttctgtgtctcaggaagatcccaacacctgcagaactaaggaggcaggagtaatgctctttctcatctttatggggcagaggttgtctctgagaaaggtctagaattgaccaaggccattcccttaattataggtagagattgggcctccaggcctggtgtgtctcagataaagatcaaatcggcaggaatttgccttgctgggggataacttgaattcttcagaaaaagtactggatgtggtatctttcagatggcacagcaagataagggcagccggtttctcttcctgccctgtgcagggcagaaactgtctcagactttcagagacattttccgtaaatcaaatacaccatcctctttagatcccatgcccctatcttcagccactaggagaacagagtggactgtctgcacaatgcagacagctgggctaaccactcctttgatggaggttttgagggtagcaagaccacagggagggaaaatggggtgctaaagataatggggaagttggaataaaacagaaatagaacaacaacagcttccatttaacaccaggctttgtcatgggattttatatttaagggcagttttcactacgtccaacatctttctacccaattctgttttccagaaacatactgcccttggctaaactctattttcatgtttattttactcttggtgaccaaacaaattagttaatatattttgtgccctacattccccaggtttaatctttgtctggccattctcctagcatgccttcactcttatattgtcaaagaagtctagtaataatatatttctttcccagcaacagttctttacatattcagatgatattttggaggctgagaggcggctcagtggttaagagatggtatttttatcctaccaaactaatgaatcaagttctcactctggactttaaggaaaaatttcagtttacacattaaattccatcctttttttctttctgatttattttcttctttcttcactcccctgcaaccattctgtatagatgtcaaacaaaaatggacacacacaaataagacaaacaactagtcagttaatacatataattctgtgttctatacacttatatcctagactctgagtgctgggacaatgaagttcacgagtcaataattaaatacagagtgaaacactggaatcgagcactagtaactgtattaatagaactgcgtatcaaatctctaacgttgcaatgacaaataatgagaatgaattgatttttacaatacttttcattaaaaaactaaaggcttgatataaatgttgcatgcactgggttgagggctgtgttctagttgccctaaaataatctttgggattattttattacatccataggacaaaggaaagattccgtaagatcaacttaaggtcattcggaagaatgcacagcttctcctttggactgaagacgatgctatcagtcatctttcaaatacatggcattcctttcttcctccttatctaggggctcgccaaatccgttttcttcttgcccaactgtctcttaactctatctcctctttggtctcttctttggcctcctctttgccaaagcccccatgctgattaatcatcctcttactgatttcgtttctttttaacttttgactcccctttcctggagttgtcatcacatcactaaaattaccttttgttcctggaatttccaataaatataaagcatctcataatatgttcttccttccatatgaagtttaaatgtctgtgttatattcttccaggaagcagtgacagaggtgttcatttggcctaccatgtttatttgtgtacttaattctacaaggccgttgaatattttagaactgcattttgtatctcaatatatataattctaattttttatagtacttgattggcagtgacctactagtcattttctgtatgtaccattagccgtaacagctgcccaggtagggagctttatacacttctcagcataagaagctacacacagacctttcagatgacagccctttcctccaaatcgatctctctgccattgataaccttttattcccaaactactcacttctttcatgttttttttttcagtgagataagcctctttgtatgggttctattatctcttccatggtttcccaggagaagggtagctgttttcagcactcagtatggttcctagctcaagaatggttttagaccacctgtagcaatacccctggcattggactatgagtcaatgacaattggtttacttcttagctacacttaaaaggatttttttttcatttactactcttgactagtttgcattagtattcccttaaatgtaagaaaataattacaaaggccaaaagatgaggtataagataaagacatttttgaaagaaattagtgaagaatttaagatgtcttaaaaaacagatccaaagagttccccagacagaggaaagtggcaaggccccagaaaaatggcaaaggatcaagattaggaaagccttagaagtgatttggaaaattccagatgatcccctcaattctcaagactgctaagattcctctcgtatactcttttcgttttcatttacagatctgaccattcttgagcccagtgatgtaatttcaatgtgcaaatgctcttattttcatttttgatgtatgtagcaaacaggttacatgatttacccattagtaggaagaaagagatagaagtcatgtgtgtgggtgcacatgtggttacatgcaaacggagactggggggagatgttggtcgtctttttctattgctctaccttttcttttgttatgagacatggttccccactgaacctactagccttgcttctccagccctaaatgtgtagtgtacacggctgtttctggctttctatatgcacgcttgggatccaaattcagatgctcatgactgtttatcaagtgctttacccatggaaccacatacccagattcagaaagagaatctgaaacgaaatctctttgacttgaccagttaggactcttaactattacctaagttaccttttctaaaggctcctgtatatctatttgctatctacctctaaagataagagtgtgaatggaaggttatcactagcctcaagaaatatctagaccaagaaggaaagtacacaagagaaggagaatgatgctgtatgatcaagagttagtataaagagtaagtccaacattctaactctactgggtaattgtaaaaggactttttgtttccattgtttgtcctgtgctctactttttaacctcaccccccaaaaaattgattggccagtcttccactagaaaatatatgagactctttcatgaacatttacacatgtgtgcacacacatgcaagtgttcgcatgagcatgagcacacacacacacacacacacacacacacacacacacacacacacacagacacacacacacacacacaccatagctgctgataaaagcaagagataatcctagaaggacatggggaaagatacatttatacacaataatcttaaaggttaaatttagacaatagataaacaatgtattttaaatcatttctttttgggaaaaaaaatctctccacaaggaacatatacctctgattataccacagaggttatgattagaagaggtggaatgtcaaagtttagtccatatttacacatctctagagtgtagattcacattctataataaatactattttgtgatttaaaagatatgaaatgggataaagtggaaattatttttttaagtcatataaaccccactgtatcagattaaaaagatgaattacaaatgggaacaggagacatggccaatataaatgttcattgatataggaacaaatgagaatacagttgactgaacatcaagagatggctcagaagttgagaacaatgactgctcttccagatgccctggattcaattgacaatactcacatggcagttcacaactgtctgtaactccagttctggaggatttaatgtcctctggcatcaggcacacacacacacacacacacacacacacacacacactatacagatgtacaacaatacatataaaaataataaataaatacaaattttgaaaaatatagcatacagttgatattgagcttggaaaaactgtaaagcattttatgtctcttctttttgttgttgtccactacctaagagtaggaaaatatttatcacatacatttgaatggttatgtccagggctcagaactttataaagtgtctcacatgttcaaaacaaccaacattcatagaaggtccacatttttatgtaagttttccagatacaaaagcaaaggatcagagttgtcactatcttttataagattgtaaaatcgtggcagatctaattgtccaattcagctcattcagatatcaaagtctatatttatttctttgtgctgctattgtcaaactctataatatgcataagcatttgaaaatatttaaatgtgtatcttccattcaggaagtatgtagccacatccatatttctcctttgaggagtgacaatgtcccctcaactgaaatgtctgtctcctgataggaaaaggcacagagacctcaatttaactaatcagagaacttaagccagtgtataatttactactgtttatacagaaacaattgcccagccattgacatttatgaattgttttctgcgaatccaatatttcagttacctacagaatttaccacaaattagcgtggtagctcttaacaatttctatttaccaaagaaagaacagagatgatggtgaggaatacattttccaaaatagggaaatgcaatcgtacaacacaaatacaaatgatttctgggcctggccttcagcactgtgagtggaaaacatggaaaactgcttttgtttccttaaaaaaaaattctgaccaagtttatctggctaatttaagtgggtaagtgagtatccttagaaagcaaactgtttttggtctatatgccaagatgccaggttacaaaataataacaaatgtgaacatttagcttaagaggacagtagtacagaaaagcagtgtgattctggggtaaagaaagcaacagcaaaaaagaaaaatgttcccaaagtattctttaccccacagtagctagtgaatgtatgatttcactactaaaataatttccacatctgcactatttccattcactgtggtgagattgccccctctccaaacagaaagtatgcccttcaacaattccctattgaaatacaaagctaaacgtgaaactgtaaaccctgatccctgatcacatctttccctacaggacatagtatccattcaaatagctatcagaagagataatgctatggatctgcttagattcagacaataaaggactcagcccatagcatttgccatgtattgtttgggttaatatttagcaaactcgccgcaggcacggaactttcctgtgtcgtgttgtttagccctgtcttcctagtctacagaatggccccactgcttgccagattcattcagtgtttgctgaagacatgaatgaggagcactgagccagacaggacagtgtgtaaaagacaaatggaagaaatgtttgagtgaacaaatgggtgagggctcaacaagcaagaggggaggtggtgacaatggcctagaaagactgtcaggaaagagctatgagtgagttcctctccacttggatgctaaacacatcttgccatttagcccaactccaaatgaatgctgtgctttccttctaaggaaagcaaattgaatggaggagagacaaggtctcatctctccagtccacctaggcaataggctactgggaaatgtgtcttattaaattctgaggatatcctcacaccacttgtgtctaagattgctatgtcaaggaaatttgttatagacacatggtatcctaagaagttagctagtagcattatcacagtgtgaattttctcactgtgggggaaagaattgcttgattcttcttgttacattgtttcttcaactatgttgtcctgagatgacctaggaagcaccaacatatcctattagaccatataatcctgtatgcccagaatgtactaattataggaagtgcaggtcattcaactcagagtttagttctttctcaagtcctatctactgaagtaataattacccagctaaaaacaaggtgatgctgcttttatctgcttttgcttctgtctataataagcttttgtagcagcaggcctgtcctgcttgacactgagctaaatttaagttgcggtgtctattcattagttcccttctcttgtcccccatcttttttttaatggcttgtttctctccattctaccattgctgctgtagaaaatgtagctaaacttgatattgtttgtttgggtttatattctgagaacaatatttatccagaagcacatgactgtatgttttatgctatattattattattattaattattgttttagtgctgtgccattaggacactaagcgacacagacttctcatatatgtgtttgattcattttccctcaaacccctactaaacattaatattgatgattgagaggtttgacttttctgtacatttaatataatgaatgccatttataggcattcagcttggtgtctttcatttatcgtattgagatttaatcctttgtagaatgtattgaaggtttagtgttctgttctctacaattattacattttaaaatccatccgaaagttaaacatttgggctatttttagtttaagtctgttatgagttataatactgtaaaaaatacatttacaagtttttgtgtagacatgtattttttatttttattggaaatatgcttagaagtatgtttgctggatcatgtggtaacttatatttaaatatctgacatccaaagtagttgcaatgttttctatacatttgagcaaccttgtaaaagtccctattttatctaggggtgaggactgatagtcccccatccttgttggcatgtggactggtatggccattgtatgagtcttgtttaggcaactatattgttgagatttcatgggtgccactccatgtcatgtctagacattatctcacagcaggaatccaggtcttctggctcttacattctttccaccccttcttctgcaatgttccctgaaccattggtatagggttgtgttgtagatgtgctaattggatctatataagttatccaatcacaagcactcagccataaagccttgtacacacgagcaactctaaatggactcagtgggatatatgtgcgctatgaatgaataacactaacaattacacaaaagagatcatgaatctgaaagagagtggtggaaggagactgaggtgaggggacaggtggaaatgatgtgaataaaatatacccatgtataaatttctcaaaaaactaaaacagaaacatctagtttggggccagcactatgactcatgaggtaaaggggaaaaggacttgctacccatcattataccctgagttcaattcctgaaacccatatggtggaaggggaaaattgactcttacaagttgtgttctgacttacacatacactatattaagctctaattcacatccttactaatgttattattgttttttattaccaccattttattatgacattgcatccaattaggtttcccctaatgactaatgagaacaaaagccttttcttgtgcttgctaatggttagtgcacaaatgtctattccaatcacttctttttagaaaaagaagtttttatgagcttattgagttgaaatagcaactattaaaaagctattatggatttgaaagcattctctctcattccatgatttgtcttttgattttacttttaaaaaataaatttaaatttttaaatatagatcatgtcatttaccaactagaatttttagttatgaattttgcttcctaacaattacttgcttggtaaggttataaaatttttctcgttttcttctagggactttaaaattgtatcccctacaaatatattcattattactttgaactaatttttgcatgtggttttattcatctgttttacattggatctccctttgtaccaacactacttgttgaacaaataatccttaaacccatttgttgaaaacaattaaaaaattcatggcttctcacaagcttttggtattttcataatatctactggatttattcaaagtgcagcctgctctgaaggctctcccacccataacctcaggggttaatcaggacttacgcactcagtgttgtctttcaccatctacttcccagcactctgggtatcaattaaatgatgttagctactcaatttctagtacagatcatttccaggtaaagatccttactcatgtggtttaagcaagatgtccccgtatttgtgtttaaatcctacccattggcgtgcaatcccactttgatgcaatctctcaagaagccttccattctgcgagctgtgatctgtcctgccatctacgtccatggtcctcaatctgtgcacagggagagtgccgtttcctaccctgcatttctgaattgctttataactccattatgggatttgacatatttgaatagtaggtttgatatgtgtttaactgatccatactctctggaatgaatgaaatcacacatagatctgcccttatgagtttaatggtaaactatttgttgacagatacgtattatctgaacccagaccacaataacacatatgcacaaaatcactagttcttagggagacagtccaactacctctttatcaagaaagagtcatccagtaaggttaaaatgcattttcatttaccagaagggacagaccttatcctcttcttcctatggagctggttttttgttttgaacataaagatcaaagggttccactttcctgagattaattgtaatatatttcaagaaacttaaatgtgagggacattgtatttgattttgaactgtgaatattatccacagttgctcattttgacattttgagacaggcaaaaggtaaatgtctcagatttacagataattctattacccttggacagttagcacagcttatttcatgtagacacatttgaactcacaacttttcattagaatctatgctcttatttttttctagaaacatcttaatgatttctccctagagccaagaacccacccccaccttctttgctcttgaaaactctagctgcttaagtggaggacttgacaaggaagcattagggatttgccagcgtgggaaggtcttttcaaaagagaggtggaaatttaggataacagagggagacttaaatgggttgatctggagacagacaaaaagatcagagcagggaggggaggattatagaagaaagaaaggaagagatgaagggaagaagagggtaaagtctctccatagacttaaagaagctttgggcaattatctggacattgaagggaattatctggaccacacatctaaatttgctgaggttcctccattgtgactagtatctggttaaggtttgcacagtaaacttgctgtcttgtgccatgagtggcttacaggttaaaaaaaaaaaaaaaagaactcagtgaaatcttcaaagtcaatctgttccaccaaagcaatccaagacctttttacagcttttccatctgtttcctagactgtctctaatgaagcaaactttgcacattgcatctgttgtttcatcgtatggctcattttgtcaaatggactgagggcactttggcccaaaattttaaggaatactttcataaagattttaagcttcctttgacaataataattaaccaagcaactcacagatatgtctagtttttttagtcaaataaggagatttgttaagataattctttgttagaagggggtaggaaaaatcctgaagaatcatttagttttttacatattttcatgtggttcagattctcaaaatattgacacaattagaaatggaaactaggatagtcagggtttacattgaaattactaaggggaaaaaaagcaactggagggagattgacacagaagtatgtcacatccatacaagcaatgcaaattcttggcttctgcttaagtataattgtatattagtgcttagggtcagcgttggtagttgtgttagcactcagcataagggttttagattccctgtgtcataaacaaacttttctcaatacatagtcagatattcagaatctatacacatgtgcatgcatgcgcacacacgctctcgtacacacacacacacacacacacacacacacacacacacacacacacacacgagttcctgggaggaaagtactttgtagttacctgatgacgcagtagcaaccacaggactttcattgcactgcctgaggaaagtggattgccagcctttcatcttttaactctgaaatgggaccccagtatcagctttgttaaatctgacacatcttgactttgccttttttttttttttgaattgcaaattcatcagcctagcgggtttccacattttaaaggagctttagtgagtctgttgtcaagtactttaaaatatgtgacattcgggtttttaacaggttcacttgtatatcatcccttcaacacagaatatgcatttataaaacagaaataaaacaaacgcaaccaacatgggctttcatagtatatgaggatgcattttacaaacaggcatcactgtgaaccaagcagggaagagtatcccacgtctgcctttaaaataagcaataacctgtgcagctatctttactgttttattctactaggaattttattaattttagttttacttgggtggagaacaaatccaacagctcttaaagagtcctttagacagattttctgttttgctttttcatgtaacactaactgagcaattgttagaatttcatttttacttgtttgggtagacaaattgtcagattcagttagctttagaaattagctgttttgacaaatgctgatttggttttagtatattgtctgcgtgttcattctcacattctcagccattagttactgaagactcgggttttcaggccaggagttttctccatgtaacccatctctccttcctgattccatccagcaggaaacctgctgaaaagaccacaagcctttggactgcaacatgaagggactgcagtgaggtctgttgatgcatagggagtgtgactggttgaaggaaattaaggaagtttctcttgtgggaactgtgatggatcttattccttttaagtccactatagttcttgcttacaatggaatcatgaaacagactagaagctaactaaaaagattgtacaggaaccagtcaggtgtcttagcaggtacagacatttgataccaggccctgaagacctgatttcaatctcagggatgtgtttggtagaaggagagaactgactcctactagtttacctatgatgtccctatcccctggcatatgcatggagaaatataaaacgaagtattatgccttatcactatgcaatatgagctaagcaacatcaaatcaaaagttttcttgttgtccacttcctttaaatcatgcaattgtattaattatgtctacagaggctgtgttctttgggatggatgccatgaatgctttatctgccttgtaggtctttatgaaggtcttgacttgattagttattctgtttaattatgtccacattttttatagcttttaaatttttttgtttattattcgtaaaggaagggtctcaacatagcccaggtttgcctcaaaatttcattctttctgccgcatccactcaaatactgatagcctagctctgtgaaccacatgtttgtttgattctgacatatgcagacttcttatatagattttataatttataatttattctcaggttttattttaattccattagattatcctctttgagttgtctgcaaattattaatctaaagccctgaatgaatcaacattgtgttattgataaaaatgaaatttagtactagatatagtatcttaagaagacttattatttgaatagaagaaacttgactttcttccaaaaataatcttaattattttaaagataagatggttcagaattcactcttttatgatgatttaaatgatgagttatacaaaatgattaaagcaaagaataaagagggtgatattggcgcatgcctttaatcctggcacgtgggaggcagaggcaggtggatctctgtgagttcgaggccagcctggtttacaagggctagttccaggacagcctccaaagccacagagaaaccctgtctcaaaaaaccaaaataaaaagcaaagaataaagcttacatttcaatatctaagagacaccatgctcttgtattccttctcatgaataaatatattttatgtattcaagtttatatacaaaatctcacacatgttagtatagttactaagaatttagaataatataagtcaatatacacacacaaatatttgtttatttgtagcactgaagagcttgacaaaatgaataaatgcttatattccaagatagtgttctgaatgttattaatattcctgtgaactgaaacattatcaaattactgatcaacaactggtattaagtcttaatacatttgtttccggggacagggcagacagctccacaggtaaagtatgtgctgtgtaaacttaagaaccctactttaaatctctagcatccacataaatacagaggaggaggctggcactggggcttccctagaagtgtctgattggctacactagacaaatctgtaaattctgaataaaaacacaagcccccaactcaatacataaaagagagagagagagagagagagagagagagagagagagagagaacaagagagagagagagagagagagagagagagagagagaaagctggtgtctatccatggccttcacatttgtgtgaacttggtgacatgcacgcacacacacaccacaacacacacacacacacaacacacaccatgcacacatatatacacacattcacacaaagcacaccatgcacttaaacacacacacacacacacacacacacacacacacacacacacacacacacacaaattgttctaatttgaagtctgttatagtttggatcttaagtatctgtcaaaaagattcacattttgaaggaccagccatgtctcctacgcatttgtgctcacttcctggtcctctctgtctagccctctctctacccccccttcttcctctctgccctgtatctttcttcaccacattctccactgtggtgttctcaccagaagtatcagagtcaagtgaccatggactgaagtctctgaaactgtgagccaacatgaaccttcttcctttgcttgtttttggaatttagtcacagcaatggaatgctgagcaatgaagaacctagaaattgtgtgctaagatgtttccatgagttcataatcttgtcccactaaagtttgcatctttttgtttgcttgcttgcttttgaaacaaggtctttaggaaaatttccatcaaactagttttaataaaacactgcaaaaacctggaatgattaacaaatccaagatgtaattgtcatccattatagatttaaggctgaaaaacagaaaaaaattgcagtactcaccaaaaaatgagaaaatgtaattaaaataataagaactcgttggaaaagaatgtgagctctttcataagtagctatgtaggtaaagagaaaaacaagagacaatgaaactgttttctgcttcttagggggaggttggggggcttttgtttgttttggtttttggttggtttgttttgtttttgcagaatattaacctatcattgtaaaagatgtagtcaatttgggaaatcactgcttctctatctccatggtgaagattttgttttgttttgtgtttgtttgtttgttttgtgagtgtgtgtgtgtgtgtgtgtgtgtgtgtgtgtgtgtgtgtgtgtgcgtgcgcgcatgcgggcacatgcgtgtacatgcatgcacacataaacatacatggttaatcagtggttagtgaatctaaaggaaaatgattgatgggcttaaagtgacttcccagagtcactgtttttaaagctttgagtaggtataactgtaaaaaggagaaaaagcaactctgtggctaggtgactaaagtaaatatccccagagaagagttcagggacagagagggctccaaaattgacacatgatcaggacaaagtgagtcttattctgaggaaccagcaagaaacccaaaggattaaatgctttataaaatcattgatttgtgttcactaaaaaggccagtgtcatggagaagataagctacagtggaggggttcttctatattgaagaacaggtggactatgcatcctgggtcttattggaacactgcagagaagatcgttaagtgcaaagtttggagtagaagtagattagtctaaaacgtgtataagtgctacattttggtttagtagctgtgctgtcaggaataagtagcaagtttaagttattagcaaatatacattgaattattaggaaatagagaagcttgaattatatggtatatttatctcatgaatcagaaaataaaccaaggactgtaagatgtcagagatcatgaagttggatggaagaaatctaaaatataaagctatcaaaaagaaataaaagaagtaagacttaatgggatttctctaagtgaaagccagctaatgtccctacacagcaagctatctacaatacctgaactcagataacactaccgagctctcgtgacaaagacaacatgatagtggcacaaaatcagacataacgatgaatgaaatgtaacagaggaccagaaataaacctgtagagttttagtcacctaatttttcacaaaaatatcaacagcaaacactgggaagacatagactcttcaataatttatagccaccagcagaagaatgaaatcagctccatttctcttgccttgcacaaaaataaccccaaatcaagcacaacctttaacttacaacctggtgggaaaatatagagaacagcactttaagatcatcattgattttataatgaagtctatgtagatcctattgtgggtattttctcatttaggcaatggtctgtctttcatttcccaaatctgaagatcgctgagttcagaaatacaagtagccaaagggttttaaataagagggtgtggtcccatgatcatactaatatctaatgatgatagaaaagagctgtggtgttggaaactagagaaggggcattaccagcatcacatacagtacttacaatcaccttgagttggttttgcagtactaacacttattttatagaaaagggaaagtaaagcttcaggaattaaaataatgtaattaaggtcacattgctttttaaacaacagaaaggattcaatcttagaccacctgactccacagaccacatgttaaccatgctactattcaaacactaaaaatcctaacaaaatagaaactgctcactctggtccacatcccaggctttagagtgacagtaaacatgtcttgcattttgtactgcactggaaaggcaccaataggcccttctcttgaatgctctccaagtccaagtgaccaagctgtagggtccagagccctcattattggcagatgttttgagagcacccttagtgaggccagagaacaaatggctcaaagcagaagacctgtgtttggtgggcctctcagagtaggaaattatatttgctgtcaaccataacttggtgcttagaactatgttgttaatttcatcaaaggggccaggtgtacctttcaaaggctgagctactcctgaacacttgaactagagcagtcagttttctagtataactgaactctccatttgggatgctctgtaaattgccatgtgacagtattataagataaaagattaattaccactcttcaatgctcacctcacccattactctcttgctgttgaatccaattgcatgtatagatggtgtgtagaacacggcagaactctgcttacatattcagtattccaagtttcatgtttaaataaaccatattacattgatacagaggcaaattcatatatatatatatatatatatatatgtatatatatatatatatataaacaaatacacagaaaaaggtagaaactaaagtttaaaagtcactgtcctaaacaaaaactgaatgtattcattggcaaacatcttgaaggagttaggtgatgctgcaaaataccagtattctgtggaattatgagttacaattatagctataaatatatctagcataagtccttttatcttttccacaaacagagaatttacacacaggtttatattagcatccaggccctttctttgggctaccacaataaaatgacttcattctaccctactaagcattcttctctatctcatgggatgtaccctttactgcggaactattggctagtcacagactctgggagaagagctatcgtcttttactctgtatccactgattagcccaccaacctataaaagatagctccaaaccaatagttatacagtcttggttaaagtcagtgagttacaaaagaaaacaatagccgtagacctgagggagaaatttgaagagaagaatggggtgaaactggggaggagggggatgggtgagggtggggtgtgagagtgatcagtattcattatgaacatgtaggaaggttgtcaaacaatggatttaatagataaaaattaacggggcggaaggtgtcaaggagactctgtcctctggcttccactcttgtttcctctgacaacacagcttttaaatttcagtattgtttggaaaaatcaggtgttggagggaaggtggtaacagtccttggattttgtgtttcctgaatcataaaaccatcccttaagtgtcctcactgtctccccatatatgctacctcactttatttacagagaaaacaggttcaaagaattaggcctagctaagcaggtatttctctttttttccattttttttttttattttttggtttcattttacattccaaccacacttctccctcctaccccccatctcctcctaccccccctcacctcctccagagcccaccccaagtccactcctttcactgataaggactcccatgaagaggtcaacatagtctggcacaataggttggggcagggccagggccctctcccatgcgttaagactgagcatggcatcccaccatagggaatgggccctaacaagctacctcatgtaccaggtttgtatcatgggcctactgacagggcccctcaggtagtccaagcttcacaactgtctcccacacacggaggaccttgttctgtcccctggagtctccacagttgtagttctagaatacttaagtttctacaagtgtggttcagctgtctctgtggatttctccatcatgatcttgacctcccttgctcatatgttccctcctccctctctttgcctggatttctggaggtcagcccggttcttggttgtggatctctgatctggttccatccattactggatgagggctctatgatgatagtttgggtattcatcaatctaattacaagggtaggcctgttcatgcatcttccctactattcctaggagtgtcatctggggtcctccttgtggattctttggagttaccctagcaccaagtttctctctaagctcttagtggctctctctattaagttatctctttcattgctcttcccctgcatccctccctgtctcggccatctcattccctcccgttctcatctcccctcctctccccttcttcttaccaccaccaccctgcccccacttttccctgtagctctcatctactttcccttcccagagtgaaccatatgtccctcttagggtgatccttattacctaccttctctggagctgtggattgtactctggttatccttcgctttacatgtaacatgaaaaaaataaaataaaagacacagagattgatattggggttcaagcttcaaagagaatatcaaaaaatcaaagcagccagccactagctcttccagctacctcatactgaaagggctgatcaacacagatgctctcaccaaatctcaaactgctgcctctcctcagtgtggctagagaatgaatgaatgcctcatacttaatcgttgctcctgtcttttatacccttctagtactagatataagttgtgagctgtaatccttttttagactgattcactcttgttggggtctaggtgaccttgaattcaaagagatctatctacctcttaatcctgagtcctaggattaagggtgtgtaccaccacctcctagtttctggctgctgggattaaaggtgtgtgcctggcttctatagcttgaggctgactttgtttttctgaatcctcagacaagctttaataaatcataaatgatatatcactacatttacagctaatatccacttatgagtgaatgtcataataccgtcaaacagggatttctttgcaagcacccagtaggtgggttggcaggtggaacagcagtgtataattacttgtcttgtactctgtatttgcataatggtttataattattgcacattataaacaggaaaatataattaaccacagttgcataattggagaaatcacctaataagtatatttcagagtcattttagtaggtgtttgtatatatctttaggatgaacatagaatatttgaaatctgcttttcagtctcagcctgtcttattggctttcatgagaaacatttcacaaaaacgtaagtagtgggaaagtttctttccaatgctgacatttcaacacacaccccaccttttcctctctgcagttagtaatgctctccctgtaaacagcaggctgtggggacagtaggagtgagcaacttcctgtaggagtctagaaggccccgaactgatccaggcatggaatggcccatccttcaactttcagaaactctacagccaagggtcttttcttccctcgagaggccacacttaattatacaggagcacaatttcttgcttacttacttcattctctccttcatcaaaatcaccaaatgatttcttaccaccacaaaattctagcctaaacaagagcatactaggcaagactgaatcaagcattcaactttcaatactttagtaagaaaatacaccaattaagtatgtttcagaaaataaaaatgttcatttaatcttcccaataattgtttgcttgtgtttatttttatatttactaatatatttatataaataatgcactagtcaataaaaataaaatatgtattgaattatctaaatcaagcaagcaaataatgcataaaatatgcagatatattgaaataattggtatgatatatgtgatttgtataattacatgttttgtattactatataatatataaaatacatacttatgtaagcatgtattatataatctataaaataagtacaagtacaaatatgtggttatataatatttcaacataaaaatacttttcctaaaaaaatacatagtttatttaaatatattggtttttgtgtatagttgtggtactagaggaacccagggcttagtgcatagcaggtaagcactctctctgagctgtatttctagaactttatttatacttcagagatttgatgtcggggttcactaagttgcccagacttgccttactcctctggtctcagccccccacccctggaatttcaggaacaaacccagggcctcccaaatagcaggtgagtactccatggtggagctgcacgcccagcaactatttaaacatcttaaaatcatatgtcttgactacaacattcactctgttccaaccaatatgctaaaattgtattcactgcttccaaaaatatgccaggctctccaaaagagcctgaccaacaacaaaggcaagcacctcactcaagcctgcttcaggaagaaaaatggtcccatgacaagtataaactacagggagaaaactaaataaaatactctttgggagaattggagaagttctagctatgcatcattttatagtcttcaataagtaaattttagttatgtttattttcttcatatatcatcaccttggagaaaattttgtggcggttgggggggggagaagcaatgtatagatgaatggttgggtgtttgcttattatcctttattaagattatttaaaactgcacttttgtaatttaacagagtttgtgttgcaagatgcaaaaaaaaggggcaattccagaatgttaggatgatagtatgacatatttgaacatgacagctttccattgtgtgttgttctttactcgaaacactccagcaattcaagatctgggcctcattgggccatatctctcactcttgccaagcatatgtggtattttggggatgtggacagagatccacaggaacttggctgagacctacagatgtatttttacctccagcggcaaacaaccagggctttaacttgctctgccatttagcacttaccactggaaccacagcaggcccacttagtgtggtccttcataaattgaaattagaatacagtcatctgccatttagactttgatttcttctctccaagattcatacagtaggacatcatgggatctaaagtagaatagatctctgagctacagctcttgtttaacaaaagaggaaaacttagtccagtaggaagaacagaatggaaaacctgtgattccattagtcaggacattctgggaaacctcgaagtcaggttggccatggtctgctcatctggacattgatataattcacaggagaattatattatatatttcccttctcatagccccagaaccaactctatgatacaatgatgttgtcaaagaacaaaggtgactttgcttcgattcttcacatgtaattatgggatttatttttctctttccttagtagaggtgtaagtactcaggtcacctttgagacaggtgggacagtctcactgactctactgtcatcatctgccaatcccatctgctgagcggtgacctgaggttgtatagtagacagcatatcatgttgcataatccaggactactgaaatctgttttcatttttctctctcctcaaaaaaataaatgaagtcttgctttggtttgtatgtccttctcatgctgtagcttcagcctgccccaagtgctcagttctcctgtgttaccttcttatgtgcaagaatcatgtgtgtgtaccaccatacacagctctaagttaatcctttacatattcataaagagtaggcttggcacaaaaaaaatattggcacatattatcagccttactctgacatttgtctgtattactattattgaaatttcaaattcatgcagaaaaggaaatgagggaagactaaaggaagggctcaagctgttttatttaacacttttgacagccaaataacaataggcccattatcagacataataatattgcaacttccaatgcttgaaataaattgcttattttgctaaaagtagctcataataaaataaagttcagaacccaaactagccatgtcaaattatcttggatatttacttttgaggagtataccaacttcttcctcactccttagtgactttggataaccagcccaggacttgccatcctgcactccatctccagcaagcccagaattgccatttgccacttgcatctccagctcttgacgtacaactcatactttctggaatactgttgacccaacaaagcctatttaagaaacccaccctaattatacagctctcgctagttctctccccttctagaactccactctgcacacttctggcatcctcttataaattttttaatttcactatgttttggttaagtccaccctcatttcctcctcaaccccaccatcacttccctttccaaattagtgttcctgtgtggtgaaattttgattacttcaggcaaataaagttgcctgaagatcagagtgcaaagctagccacactagttagccatagaggccgggcaatggtgacacacacctttaatcccagcagacacagaagctagccatagaggctgggcagtggtggtgcacacctttaatcccagcactggattggaatagaaggcaggaggagacaggagctcattgcagtctcagtgagcctgaggtttgatggagagcagtgcagtctgaggacaggatagccccttcggtctgagcattggcagaggtgagaactctctagtatctggcttctttgcttctctgatcttcacctttaaccccaatatctgtctctgttttgtttgtttgtttgtttgtttgttttggttttggggttttttgtttttgtttttattaattgtgctatagtcctgtcttaaaatcaaacaacaaaaacaactttgagtctatttatcgatgcccatgtgtgaagggttatgggaccatctactgaagcatgtgtagcctctcagggcccacatccctgaagataccttccccctccccgggcagtcagcaattgccggtagcttctcaccccgggatgggatttcatgaggcacttccccacccacactgggattttggctagcttgatcttctgcaggtcttgtgcatacagtcagggccactgacctgcatatagtgtgccactgtttacatctccttctgatgcatacaatcttcccacatcatcttccatgagaatctaagccttgtggggaaggcgtgtgacataaatgtcccatttagagctgagcaggagatcctgttattctctatatgctagctgtttttgtgtctctgtattaatcaccatctagtgcagggggaggggggaaagacttctctgacagggttgaggaaagtactaatctatgattataaagaatttagggggaagtttagtttattattctgtccatttagcacaaaaaatagtagttggttttcccctagggcctatgacttagaagctcagggcttttctcctattgaacagtgccaggtgtgggttcagtattgtagagttaaggccaggcaaaaagtggttggttgctcccataccgttcctgccactagctcaccagaggacaagtatcaccaggtaacttgttacagctaacaaggctcaaagctggacatgattgctgatcactggtattcttcataagtcatttgttatttaattttctgtctacttggttcttttgacagtggcaggataattatctgtccaagtatatagagtctgtgagagcaagagacccttagtacttggatgaagtggcactaagcctgccacaggaacatttctctctcggcatatgagatgaaagggtttcatgtccaccttgcatggttttggaaagagggaaaacaggcctaatacttccatttcatctcattattctccctagaaagtgagttaaatgctttgaagagaaaaaagaattaccatcgtccccacagcagtaatatgcacttcattgcttaactctgctcttaataaaaacatagttgaaaattgaaaggcccttcattctttctgtctttgaaaagcacaggcaccaatggaagaggaagtgcaccatacatattcacctattccagtcaatgatttaaacataagcactcaccagaccaagaaccaaaaacatgaaggaaagtactgattcgtgaaccttgtatatactgttcagagatcaaagggctcaatgaacaaggatcaaagtgtgtgtgtgtggggggggtccgaatgtcacactcttgcaacgtgaagtttctcacgattcggaatggcttcatcagaaccgctctgttcagccgccgaaaagagggggtgaatcaatgaaaccatttattgggatgtctgttccttccatccaaggcagccatttatttcagcacctttgtcagctttcagggaaggtggatttttggagaagaccaacctttgttgcaggtatgtccctttagtagtggtcataaaagcccttcatagcagctgtacaaccactcgtacctcaactgtctttgcaaaactgagtttgcaaaattctttttatattttggagctttctcactcacaagaatttttctgctatttcattagacattagaaaatctatattttagaaattccttgaagcaattacggagaattacagagatttgaagtggcaatcttgctggctgggtgatgcattatgatttttaacaagttttcacatatttatttgctcaccaaaaccttgtttagcttagctgaggaagtttccaagacatagagttgataacagattaaggacttgtagactgatcagttgagtgcacttttatactttaatgttctctctgtgtctctgtgtctctgtctctgtgtctgtctgtctgtctgtctctgtctctctctctgtctctgtctgtctctgtctctctgtctctgtctctgtctctgtctctctgtctctctctctctctccccgtgtgtgtgtgtgtgtgtgtgtgtgtgtgtgtgtgtgtgtgtgtgtgagagagagagagagagagagagagagagagagagagagagagagaacaagtgccagcagaggatagaagagggtgtcaggttccccaatgatgggattatttgtcatgctctggtcctctgcaagagtaacaattgctcccaatgacagccattttttctagccctatgtaataaaatttctacacaaagtaaatcataaaatttgaacctttaggaaaaattgcttggagatattggtgaacacgaacactaaggagcatgggcagaaacaacatctccatgaaggaagtagaatgcttggatccaagcaggtaaatctaataagatcatggtagagatacattgtctatcacgtgtgtgcacatctttaaactttagggtctacgcttacaaatcattaccttctgttaacacattcttttctctagagtgtgaatagtttactagattgctattgttacttgtaatctcattccagacacggtttcctggaaggaacccaaatcagcagttccagctacagattaccagtaagagtggtttctatctacaaatggcatattcctctacattctttctcttaatttaattttactgtcaagtttaggaggaacctagacatccttctccagagtccctgactttgaatattctgttttttaaatgttgcctggttctgtctttttctttacgaacttactttatgatactattctccttaggtgcttctgatatcgtcctttgtagacaggtttgccttgtaaagaatctaaacttgagtactcttcaagtttagaatctcacagtataaagtgttgctttttttaagtttctacagtcacctatccatagtcctttttcttactcttctattctcctaagtgaccacaatcaaacttccttacccagctcaaaagtggggtgggagagatgtctaggtggttaaagcttatgtgttcagttcccagcacccacacagtggctcacaatccgtaattccaaaggattagatgtcctcttctgatctctgaaggcacaggctggcatgtcatacacagacatacatgcaggcaaagctctcatacacataaaaaaatctaaaggaaaaattcttggacattagtgacctcttgggggctgagtctctggcatgtcgtttcccaggtttttgaagcaacaatctttcactctccctgactgctgttcctttgaagcagccctgaatactccaaaatttaataaaaagaatttgaactacagtggcaccagtaaaagtcaagagctagaagaccacatggcctccatgaggaaggatgaaggagatcagtttgaaaaactgcagttattaaatgaagcaatggcaacacagtcagggtgagcacagtttcacagtggtagttaagcctttggtgtcatgaccaaggaagtgttcaggcaggtgatggatagcttccaacagcagaaatgcaggaagtgaaaagtgtcccatctgtttcagccttctgatccctcccttctgtagactggagagagcaaggttgtgttagactcctatgttaaaccaggccattgaccatctggttgtgctttcagtgtgacccggccctagaaggacagatattccaaatgaccgacaaactgatttcactgaatgagcaaagcctgaagaccgttcccagcctcaagtcgatgagagctgcgagggcgtgctttccagggtgatgctgtggatggggaccatgcatccttccattctttcctgtttaaaagatcggttgtatacgtgagtgtttgactgctggcatgcatgtgtgctacacatgcgtctggtataccagagagagcataagacctcctggaactggagcaataggcagtgatgcgaaatcatgtgggttctgggagccaagtacaagtcctctgcaagagtaccaagtgcgattaactgctgaactatctatttatataattcaggtgtttagtttgtggcgatatttttttaaaaatcatctggactatagcagcaagacctaagtcacaatagttggtctaagtggtaggtggctatggttttgaaggaacaccttcaaagaacagttaagtatcggcttgccaagaacagctcaggtcctgaatggtgtccacgtgccatgtcccagtgatcaagaacaagaacaaccactgtggcattgataatgcagccagctaccccagtaagtgaggcttttctggagaaattccatcttaaagctgactaaacccctattaagtaagacaaagtacttaaatcattgaggattccagttatgacttgaattttgtgacattacacgagtaaaatattactactttaattcctgttataaacagctttataacattgtcaagccattgcttaattctaacacttaattttttattatataaaatggagtatataattttccttacattaaaaaatgtattcttgggctggagagatggaccagaggttaggagctcctccagaggtcctgagttgaattcccagcaaccacatggtggttcacaagcatacgtaatgagatctggtgccctcttctggcctgaaggcattcatgcagacagaacagtaatatataataaataaataaatctttttttttatttaaaaaatctattcttcatccttctgtctctctcggtatctgtgtgtgtgtgtgtgtgtgtgtgtgtgtgtgtgtgtgtgtgtgtgtgtgtgtgtgtatacatgtgttatggtacacatgtagagatatgaagagaacctaagtgttggcctctgctacccatcttctttgagacaagaactccttgctgctggctgctgcataaagcaagtcgttgcccatgatcttccatggattatcctgtctctaattccaggactccatgctgtaggagtgcaggattacagatgcacgttactgtacttaaaggctttatgcgccatccgtgagtattcatggatccaaactcatattctcacacgtgtgcaacaagtgcgttacccactaagccaactcctcagccctctaaagtgaattttagttcggtatctgggggggggggaatcagactttctcttttgtcttatcattatgtttcctttttactttctgtctcttccttgggaagagcatggaaacagaaaactctgagtgatgcactaggtttcatttagtatcttcagttaaactctctgatttaccgtgagacgttccacaagtttaggttgtactcttagtacaatacacacatgtgcccatgtcctttcctgtacacataaagcacatatcattcccaatgttccttttcatcagtgattttcttcatgcttctgtttccctgctcatgaactttggggcggggtgtgttaacattttagggatctgagagcccagcgttttctgaaggcaacatgctggtatagctggggcagatgacagatggctcaacctgtcttgcaatgcacaggtagaagtcaaggacacccccagctttctgcaagggttcctaagaatgggcaaagcaagagacatgtggcagatgagatatgagatttcatgtcgcagcataaggtgactgacataaggacagcacatggccctctccctgctttgttccttgcaatggaggaatgaatgccagctgcctcagctggaaactgttagtccaggaagttcgactgtccctagaaattccctgtggacccgcatgacttgtctgtgactagctatgttttttctgccctttgtttaattcttaatttacaattatcctatactttaaaatgtactgcatttgcctttgagttatgctgtatattttaatgttaaatgttttatctgtagtttttaatttcatttctctttggccaaatttttgaacttaaaatctttctcataatattttgaacttcttattcatctaagtctacatttctctagctgtgttttctgcaattcttgaaatctcgattgttttatttcttccttatttgcttatttagtaagtacttgttaatttcctgctgtgtgttcaaaaaacattattttacatattttagaactaaaataagtcttagatacaatctaaccccttccccccacaaaatattttgttcctgttcaataagacctacagcttatatacattttaatgttttatcctaaagagttgttactctgtgcattttaccctgtgttatgaataataaattcaccctagttttccatggactgtccactgatacatgaggctctgagaatacacatatctgcatatttttacaattcctttttgagtttgttatttattttatgcattactagaaacttcagctattcctttgattttcttcctgacgtctactggaggtactgtttcccagatgcatcaagagtggacaatgagttagcatatcttagacatgtgcctcagaaacatagcatagccaacattcattcattgtccatgacaatcacccccagaatgccacccgtctttctagatgaataccaggcttcttagaatttaagactgtgtttcttaatcattcattcattcattcattcattcattcattcattcattcattcattcaacaaatattccataagggtctttttgtagtttttataagagtgatagcaaatttcttccccatagatactacttgtgtgttgataagcctcagatgaagcggctttcttctgtgccgttactgggtacagactttgatttctctctctcatcttattctacgccacattctttaagggaagccctcctgtcatagttatgcatctcctctaagcaatcatacacatgatttccagatttccttttggaattatcatctccattctgcttaggaatttatcctctcttgaagaccaaagtgttgggctcctctcatcaagcaatgtggccacagagctgaaaactgcctcagaaagaagccaaatgtgacactttctcttaacaggcccctttttggtttctatatttttttctgggttagtgtggaatctcagatagcattagcaagctttgtaactacccttgatgacttccatggatgaccctctaagtgaacagttctcacctgtttgcctgaggctttgatcatctagggcttttaggctttgctctatgtataaaccactcctcccactcccctgaactgttactctccacaagacaacgcacagttggttggcaactgccagcaaatgacaccaattgccaccaaacttctagctcctcagaacagtcaccagattgaaagaaaattactcacctctccaacactgtagctcctgtggcaagaacagtctatattggttcattataaggttcattgtgtttaaaatgtgagctcagcatgatgggaggctaactcaatactcagataactgagatcaagtattgttaacattctacacagtgagtttcaagaaatcaagaggaataaggaataaatgcttgtgcatttctactttgtcatcaatgatttaaatttcatctgggaaatacctctctaaaaactgttcacctttaagatctacttggactattaaatcccttggcacgtagtattgtcggaaaaatttgactatgttacaacagtaaagtgtactgaattcaaacacatattggagaattcaaatgcaataggatcaccaatagacactgataaaaggggcagtaaccattatttaaagtcaataataggattttaattatgtagccataggattttaattatggttctagtcattcctttttattgctttatttatatttatgtcaatattaaatgtcaatattaaagagacaatgtatttaaatttgccatctcaaattgtcattgggttgtcaaagttcaaaaaaagcaatctattactattatattttcttgataattatttcagaaaagtatttctcttacttttgaggacaggccttaatatttttttgcaagattgacatgagagaattatgacaatggatcacacatctaaattagccctttttgatgttttgtgacaaaaggtcatgtgattatatttaaaatattgctgtctgtggatggagaggtgtgactcagctgttaaaaaagtattgtgctctttcagagaacccaagttgatttccaacatctatgttgagtttctcacaggaaatccaaggaccttttctgtactctgtgggtatctgcattcacaggcacgtacacacacacacacacacacacacacacacacacactaaaaataaataaatcttaaaataatagttgccttaagagcaatatgaaggcaagtggggctgacacccagtcagcaaaaagtacgtgtggatcttttgatgttccccagacttaactattagtaacctgctagtgactgaaaacctgactagtatacatatattatttatattatatgtactatacacagtgagaaatatatgacaggatttcaagaattcattttttaaggttgaaatagagtcccctaatgtccaggctggtctcaaacttactatgtagacaaagatgacttggaacatctgatcctcctgcttttacctttcaagtactaggattcctggctgtaccaccacatctgacttatgcaagtttatggttatcagtagagcaagctagacaagaactataccagtggtgttgttctttttttgtcttttttttctttctttttcttttattttcttggtttttcgagacagcttttctccgtggctttggaggctgttctggaactaactcttgtagaccaggctggtctcgaactcacagagatcctcctgcctctgcctctcaagtgctgggattaaaggcatgcaccaccaacccccggcccagtggtgtagttctaaactagctggtgttttctttaatttctatgtagtagcacgaataataaaaacccagagtcagatactggggttcaagctgaagatcagaatgtgaagctagccatagccttagaatcttggcaggtgtggcacacacctttaatcccagaactcaggagacagaggcagatggatctctgtaagttcaaggccacccagggctacatgataatgggtcagtctaaaaaagaaacagctcacacctttaatcccagcgttagagaggtatataagaaggagcccagggtctcatttggcattcagtattcagtattctggcaattagtctccagtcacattgaggtaaggatctccccagccttggtagaggtaagagctctctggtggcttggccacttggcttttttgatcttcagtggctttattagatcataaacaatatatcaccatactatatattgtatttattaatgtattttatttattcaagaaataataataaaaatcaatgtttttttaatttttaaactatttctggtctatagatttattctgtaatgtttttcaaatctacacaaagcttcaaaagccaaactcctgtataagtggacccacatagttcacacctgcattgttggagggtcaactatacatggaattttatcgttgggatacatgcactttaacttgacatttcagtctcagaactaagtttttagatgtataactgataggttccatgtgtccttacttagaaatcaatatcaattgtatttttgtgaatgtattttattcttttacataattttatatcgtgtcaaattaacccagtaaatactgaatgatttttccacccattagtaagctttaatctccaagcctcaacccaaacttatgtaaatgttcatttattaaatatgacttgaaagcttttataacaaaactcataacataggaacataagacaccagaaggcaagaactgggttctagtcctagggttcctgacctaattacggggtaagcattttaattgttcaaatgtcaatttcctcaatcctgtctctaaaaataagcatcaaattaaaattttcctatacaatatgggatgtgatagctttccactgctgtgaaaaatacctgagaaaattgacatataaaacaaaggcttgcccatgtcctcttggagcttgtggttcatcccagcacgagtgagtggtaattaaaaattaaaaagagaagagagaaagcctggtgtccccatgtcatcctcaagggcacatacttaataatccagcttccttcaagtgcatacctccaatgacacacctcttaaaatttcaatcatcttccaaggcttcaacgcagtggtgtttggaagacattcaaggtccaagttatagcaatgaggaatgatttttttttcttccattttccctctgggagctagaattattttggttttactcatttttattttaaatcttttataaaatagattttgatcaaattttctcctttcccccaattcctcccagatctttatagcctccctacctacccaacatcctgttgtttccttctcaagaaaacaaaacagaaaaacaaaaagcaaaaacaagaaagactaagccaaaacaaagaaaaacaacgaaacaaaacatggagtttgttttgtattgaaaattaatcctgagtatgaggcctaccctgcattctggttgataaatccagtttcactccattagagaaaactaacttccatcttccaaaagtcaacaattgcaaatagcttctaatgatacattgctgtatctgtgaatcagttcattgctcaacactcataacaaaatcttctccgttcagttgttgggaattaacacaaaaactcagaactgggtaattgtagagactgagagatcttggaacactcagacctaaatggatgtcttcatcaaactgatcctttcaaggttcagggacctgtgcagaagaggaggcaggaagattgcaagagccagagatgatcaatgacttcaaggaacagcatcttccagacacagcaaggctgatacacataagaactcatgggactgtgacagcacacatgagacctgcactaattgaaattcagataaaacctcagcacaaagaagagaaagtgggcacaaagtcccacccctagccaaaaaaacaaaatgaccttttatgtaaatacataaaaattgatttgttccactaccccttcccacaattaagcaaaatttaaatcttagcaaaataaaagatgaatattctatgacctatgaacacagatatcaaggttttgatccagcttacatgaaagcttagagttcttagatgagggtatttgggaaagtatttcaatctttgtccataggagtcagcaaggaaatgtttgtttccaggacagctaattctttcaaggtatcttaagtaggctagtgtcttcccattcatttctatgtggctacaagtaaggctcgtaagtttgttctcactagaagcactgcaagtgaaagacagccaataaggcatgacactgccatctgccccaagggtgagatcatctttccagggagcatagtggccagagactttaacagacaatgttgtactgagcttttctgtataaacagaccacatggggatattatgactgatatagttatcaagaagggttgcacaggtacccaccaccccaaatctgcaatcttctatcctctctgtcttggaggagtttttcctcttcctcacacatcaagtactgctgcttttcatgtgctccttcaggagggttctcattctgtatccttgttgactattcttaattatctcttttcaaggccattagaaattatgttctggattttcttcctacgtggaatgagatggaaataattcatgaatactttagaaactgaattctaggagattttaaaaaaaaacttattttatgttctctctcatagtagcaatgtgtcccattctagtgaggagtgtcaacacaatcacagatctgaaaaaaaaaaaaaaaaagcagttttctttggctgaagaagtcagaagactcagattattttgtagatataactccctttcttgagctatgtaagtgacttacaagtattactcatatccagtattaatacctggttattatgcttttatttctattttcttcctgaaagacatttaaatatagcttactaataacatctgttacacttgaaagattggaagagcagaaaaatttaggatgcatttgtattctgttttgcatcagtaaactaaggctatgaatcattgcccaaatgatgtgcagactcaactggacagataaggatacactgtgaggatggaagagcttttgactgtcatttgagaacacgctaaatcggaaaatgggtttcagatcatcatcactgtcttgttctaagcattgtcctgcaagtttgctctgcctatgtctccaaaagcatatcttagattggctctgggacttaaatgatagtcatttcagagttcaatgctcaatctcataaaatgaaatgcacagtttagaaaaagaagtaaccaagggactggaaagatgcttcaccggttaacaccggttgctcttgcagaagacctggcgtcagttccctgcatccacccatagggtttcttgcaactaatccctaactccagttccaggagacccagtactttcttatgacctccccaggcaccaggcactcacatagtgagcatacatggatgcagcaaaatactcatacagataaaataaataaatctaaaaacaacaacaaaaaaagcccagaccaaaattcatgagattatgtctgaaaatgctgcatggatttgtcaatttcgagggcaattcagtgtgtagaaattactcctatcagatccataactgcactcttggcttctggggccatttgcctccctgtacacacaaatatacataatatagccatttaatctttctcactattagttttcctaatactgaccatataatgtttaagtcgtgctaggccataggcacttcttaattaatagatggtagctagttatggtttcaaaaataagctgtccaattgtaaaatataactctcattcctagaggagttctggtgagggtccagtattggttgtgtacctgaagccagaggccttgaaccagaccaacaactcactgcaacgaacatttgcaggtaaagctgagtgacacaccgcagcttccattgccaacaagaggaatgaagaggtgttggagaggtggtaaagatggagaagcaaagtggttttgtttgttttgtttttaattaatatttcttaagttttcttatgggcaggacgttacggggtgaaggatggatacggaacaactgggaaaatgagcagaagtggagtgcatgatgtgaaattcccaaagaatcaataaaaaaagttaaaaatatagctcttttgtcactttgatgaaaagatgatggtatagaaatgttacgctacctgcttcttttctccaactttgtagtattgattgtaaaaccagatcctaagatctactcccatgaacttcaggtcaattccacacagatatagagttccacgcaggtaattaatgttcagatctaattccatgaagaaatcctggcaaacaacccttgttactttcagaaactcagatttttaagaaaatacaagtgtttgaatgtccttaattccaccgctatgccctgcagtttagtggttccttaggagtgagctaaggggagtcacatggtcttctcaggctaggtgttttctggtctgtttagttttgttttgctacctctgtttctttttctctagcattgtccttctagcattgctttcttctctgtgcaaaattagacggagggaaataaaatacaggcatttcgagtgacttcctattgagaccccccatggtgttccccacaccccttgcagtgacctgactcacaagcaaagcctacttcaacgggctctaaaactctgcagctcacagtgggtgttctggccgctttctccgcctttaatttgacattcaattgttttgttatgttttaaagtaaagcaggcctcgcctgcgagtaaagctgcatagaacctcaggccacactttcccccagcgtctctttctgaatgtcccgttttaaatagtaggtgaaacgccataaatgatgcttcagggaagtactaatgggcacttcctgctcctgccaaacaaacactcaggaagtggaccagtagcgcttcagaggaagagtgtctcctctccctgaagagagccagggtgggggtgggtggaggttggtgggtgggttgaagggtagttcctaaagttatttgttcttgggctttcagggttggaaaatagtcatcctttggaagctttatttttgttttctatccattcacaattctctactccttacaaagggaatgacgctccttgtttcagtatttatttattaaacacccccatagaaggcatacacgggggacatctcaaatctcgcaaagaataaaacatgctgttgcacacatacatttaaactaaaaatagcttttcatttttacctctggtttatgatttgagcttcttttatggaaagtaaaggtccttatagtaattattcatgtaattatgtaaatatgtatatactgactttatgtgtatatagtattaagacaaaatagagaatggtaaatgggttatataatttaaacacagctcttttaacatatagaaagggatattttgatttctgcaatgttttctacctcctgaaatttcatgactgtaactccctcatattctgtgtgacactagacacagtggcttgcctttagctagtaagtgtatgcaggaaccctcccttccatgtgacatgaaagaacatggcttctgtctcagcagactggagactttgaccaagccaagagttaagtgtggaggccacaaggcaatgactgggggcaacctctctccaacagcccaaagaactcaaccctgtcaaggaatctcgggagtttgagagttgattccaccttgagcagaccatgagtctgctctgagaaactgggtgctgcttctgaagagagctaaggtggtggtggtccttcaagatacacacctcactcccagaaagagttcaaatatgtggcagtagataactggtaacttcactctcttcctctctccctctctccctcccctttccttgtctcccccctctctccccccatctccccacctcactgccttacatatccagagctcctgtcaagactgggagaattttattccctcttctaaatccttgaagttcaagcatgcaggtaaaaattcactcttagaaatttattcctgtaagcttatagatgtgcttgtattggttattagactattttagacgtattcaaaattatgtcattttttgaagttactatgtagagtagtagttttgtttgggcattctcaggcataaaggctattgtactcccccaaaacaatcccctctccttccctttccgaaccccccttaagaactctccctcctcttttatagtgccctttctactttcataccccccacacacccccacacaagatgggggaagggggagaaaagggagagggagagactgtctgagtctgatttattttccctaacatatagatttcttctatccacttccttgaaaacgccaggatctggtttttctttatggctagaaaataactgtggtgtgtatatgctatattctctttgtccattcatttgttgagcatccagtcttgctctgtttcttggctattgcaagcagtgcagcagttacgtatggacacaaaagtgtctctgtgttgtgttgacttggaggcctttgactatacaccaaggactaagtatagatggcttattcgggagttctatttgaggaatcgccacactgatttacttagtgttccatactccactttacactcccaacagcaatgcactctgggtccctttcccatatcctagccagcaattgtttgttttcttggtgatagccattctacctaaagtgaagatggaatcccaaagcaattttaattcacatttctctgataacttttatgaatacttattgatcatttgtattttcttttaaattttattatttaggatggcttacagagtaacgggttttcatatgggatttttatacatatttcattttgattgattcttttccctcttattttcctatctgacccccacttctccactgtgctcctttgtctcagaatccccttctatcatcttccctgttccctttcttaaagcctctattgtttttctctaatcacataggcccctgtcgagtttctatacccatatttactcccatctggatacacatgttcatttcatggcccaggtcctgactggatgactttttggtgtgtgatttttgagttctgaagatcttagattctaacctaccacctggtgtgagtgagcaaatatctgctcctcttctatatgatggctttttgctgatttttttcttgctatgaagaaattttttgtttcttatgaattaaaaaattctatatcgcccattttcaaagccaagagaacctcatagaagaagggacaggaagaatttaagagctggaggctgtagaagcctgcagtgaaatgctgctacccagatatgggtctctgcataagagtgagcttttcatattcccacatggataaaggtgctgtctcaactccttcctgaggacctagtgactgttagtggttactggttgctgaaagagggagtgtcactttctttaatgccatagcctcttaagggcacaagttgggctcagtaatgacgttggtgaaaatgttctctgtttcccccagttagtataatgttggctgtgagttggtcatatgcagtcttcattatgttgagacatagtgcttctccttgcagtttcttcatgacctttagcatgaagggatgcggaattttatcaaaggccttttctgtctccactgagatgatcatgtgacctttatcctgaagtctatttatatgttttattatatttatcactttgcaaatattcaatcaattttcgttcttgggataaagctaacttggttgttaagcatgatgttaatgtgttcttgaatttgggttccaattactttattgagattttttttgtttgtgtgcctatgttctttttttttttaaagattttatttatttattatgcatacaacattctgcttccatgtctatctgcacaccagaagagggcaccagatctcataacagatggttgtgagccaccatgtggttgctggggattgaactcaggacctctggaagagcagactgtgctcttaacctctgagccatctctccagcccccgctatgttctttttttatgatcaaaatatactttatgaaaaaatttaattaaagaagacagagaaaataccaaaccaatcaaccattaaaattgtaaatagacaaaattccctgatcaagagtcatggagaggtgaatgatttacaaaaaagacaaaacaatatccaatgatatgccatatacaaaggcttcactttagttttaaaatcaaggtgtgcctatgttcttaaggaaaggttgtctataatcatcttttctgtgtatgccctcatctgattttagttatcagtgtaatattagcttcatagaatgagtttggtattgttcttttctgctctgccctcccccgcagacagggtttctctgtgtagctttggagcatgtcctagcactcgttttgtatcatgctggcctttaactcacagagatctgcctacctcggcctcccaagtgctgggattaaaggcatgtgccaccaccaccacccccctcctgctctgttttatagaacaagatttggtacaatttagcagtcaatccatccagtgctggcttttatttgtgggagggactttttgtttctgcttctatttcttcatttgttatggacctgtttaatttgtctgtatcttgttgatatattttcttataggtcacatagtatctaaggattttatccatttctaacttctgcagattttggtgtagatttttcagtgagtgtattattaattgttactatgactcttactccttaagatgggaacatacactgatataaacaagggtattcatttatctggcaaatttagctgcttagaactgagcagaaaagtcagtggcataattcaaatagtgctcactgataacttgccttaagcttcctctctgagccttggtcagatatcagctcgtcttcagtttcttcctttctctttactttatctcctgtttccttttctcttcatttaacaaagaaagactcattcagtcctaattgagaaggtaatattgcactgaggagtgataagacaatcaatggtgaaccatataaggtatgatctctgatcgtgtctttagaatctcctgggagatttgaatgctgtttcagctattatcttaagaaatgtttaatgactgaatggtttgagggaaagtagcttggccgtttaaagtaatcattaccagggaggatttaggatggcttagtgcctaaaatcacttgcttggtagcccaaatttgatgtctccccaccccagtttacattaaaaaaaagctagatgagtggctcaatctgtagccccagcactcctatggtaagatgggagacaaagacaagaaagtcaccaaaagagttttcagtgcagccagcctggggaacacagtgcagcagaaacagagggaccccaattcagcagatggaaagcaagaagtgaccccggtcttctgaccttcacacttgtgttgtaacatgtgcacagctacactcacagcattcatgcacaggcacacacatgaggggggggagggagggaggagttttacttgtcttactttaactcctactcccatctttttgttgtgaccatacatgacttaccaactcttttatgtctttgtttcttgacctgtatggtggaaaaatcacaaaattcatatgttgccaatggggtgatgttaagtagcaggcctttggcagctgactactcttctcccttatgctagcattgggagtctgtgcaaatgtacacaaggcttcaagcaacctagggataaccgcccggggccttctgctttgtactatgtaagaaaccaacagtgagagccacaccaaaccaaatatcagtcaggtctttaatctcctaaactgatcgatgaatttctggtctttctaaattacccaattcttgggcattttgttgtaggttcagcagtatgaataaaataaaatggggataatagggcttgtaaagtaaggttggtgagattaaattgatcatcccagagcaaattcttcaagcaaaacatggaatatgaccatattgcttaataggagaacttaacaaaggagttgcatataagtcaggaagttattccctgagaaaataaagagggaagccaagactcaaggcacagtccccttcttgagagtcattaaggattagatgaaaatggtcacatatactcattcattagttatcaggattgcatcccacagtgagaactacccacaggagaagagcagaaaattattacaaagtagacacataaacagagaacaatgatctcagagtgtcacaccatgggaaaatgctgctgttggtcctgcaggcaccaccaacataactgaataaatgactctgttcataggacattagtcacaagtggtagacagttcactttcatcatgctgtcctaaacaagcagaaatctagagagaagaaagctttgtggtggtttgtattagccactcaatgaatgtcactgcttctggttaatctttaacttgctatgctgtctcctagttttgtaagtaaggcattctagttttgccccaaattaggctgttttataccacatctagctcttcctatggagtaactaactcactgccaatttctggtgatgaatgcctgggattttaattgaaaggttttagaagactttttttcccctaggagtctcaaagtagagtcattccctagtctgagggccccaatgaaatagaagccactagttaatcaattaaatgtgggtaggcatggtggggtactacaatatatagtatcttaaattttcccatgtctagtgccagtgaaggtaggacctaacactaaaacctggaattaccaaaaaacagaagaataagtgcttaagaatccattagactgatctcctcaatgataatataagtaaaagacaatgagggaaaaattctcaaatgttctcaaaattctgcttaaacagggactcgtcttaatttagatattgtatcagtaattttttgcttctgtgatgcctcggttatattcaaaattccttattaagttttggttgagaaactcataagagcattcttgccaataaatcaaaggctaaaatttcccaagatgacacttgaagcagtgagagagatattctttgtatcttatctagctatttttgagactagcatagtgtgagtagcctcgtgtacatgaacatgtgatagtttttgcctctagcatgatgttaattttataatccctgatgtttagtccatttgaaataaagtgactatgaagtattgataaagtagtgataaaaaaaactaaataaaaacagacagggaagcctatagagactcagaaaaaattcactgctggatttcctttgccttttacaatgaatggaaaattaacaaaactggaaataaatatgaactaagagtacaagaagaaagtattctttaagatgcagaaggtgactactaatggattaaaatgcattaggccatgaggaccaattctgaagcaaacttacaatgatgtgtctttgtgactttgatggccagcattccataaatgctacacataagtgcattcgttttcgacattaaacagttccagagttatttcaaaaagatatttttcccagcacatgaagaagtctaaagttacagcattatgaaaatatcccttggtagattcatgtgtttatcatttactttagggatatttgtgcccacagttcgtctttttgtgctgtatataggtggtcctgactgagcgttctacgtctatgggaaattttaatttgctgaggaaaactctcacaagcattgaagttaaaccagccatgctgtttctgctttgcctttagtggagctgtttggggaataagtgtttgggattataatatctactgtaataagcggtgttgtgtaattataaccaaaaatgggaattcaaatcataaaactttgtcctcttcattgaaatgcagatgtttcccttcttttccctcatcctgttaacaagtttataacaattgcattccaactctgtagcttttattcaattggagtgatttcaactccccctccccagaaaaaaacctatagccatcacatccttttagcataagtatccaaatcaagaaaagtacacacagaaggagacatggatacaaagtcccacccctaagcaaaaaagctatttgtaattgatattgatgaaaaaatccattttctccaatggattgtcactatgtcaatcagccatacttcatggcaggcctcacctcatgctcaggagtaactgaaaaacacaaaacatggcaggggagaggggtctacatttttttgttctgttttagtatttttttcttactagttttcttttccctctcctttttgtaaattgattttctttttttcttctttttcttatgagaaagacagagaaaacatgaagttggctgagtgtggtaatacattatttataatttattaaagcttgcctgagggcacagaaagcagagctaaccacaagctgtagagccaggcagtggtggtacacaccttaatcccaggactcaggagacagaggtagttggatctctgttagttcaaggctacattcaactacatgaaattgatccagtcctaaagagaactcacacaaaggtgatctcagcacttgggatcacacgcctttaatcccaggatttgagagatagaaaagaaagagacagcaatctgggactggcatctggggcttggtggagacagggttgcagtcagaggtttgatggagagatatattctccagctacgctgaggacaggacagccctttcagcctgaggtagaggtaagagctagtggcgtggctgatttacttttctgatcttcagtttgaagcttgaaccccagtataaatctctgggttttatttttcatgttacaggtttaaaaagttactgactttttaaaagactaaactttccttatataagatatcttcagtgtgttccatgtgattcttttttatcacatagctgtgtattcttggaaggactatcaaagcaagtacttctaatctttgtggaacacgccataagatgcacaatgctcgcttcacctgagttaacactcagggtgttaactttgatttttcaggcccaattgatgtctgcagtattttattcaccaaaacatcatcattaatttgtttctgaaattggcaagtattttgtagagcaattctctgaagttataacaatgtattgtatcgcattaaagtctatcattttttttttgtttgtttttttcgtgacaaggtttctctgtgtagctttggagcctatcctggcactcactctagagaccaggctggcctcagactcacagatatccgcctgcctctgcctcccgagtactgtctatcttccttttttagcatccattgatgatgtctatctgaattagatataattatgatgaatgtcaaatgataacttcccacttgattgtttgatattctcccataaattatctctcttatcccctcattatttttaaattaacttaaatgaaaattgctcctgggtttttctttgattcaatgatacacttttacctttattattattttgatactcaaataatgctaggtatggacaatgggaagccttgtaaacaactccagagtctttatgatatatggtcattattcattcattcattatttcacaaataaccagaacattttattataggcttatcttgtatctttcctattctaatacatttagaatcagtcatttccctaaggattttaagagtcaagatttaagcaaattgcatgttcatttacactgacctgtccatgcttttaaacttttcagtggagagaaagtaaatagataaatagatagatagatggatagatgacagatacacatatttatttctatttattgttaggtaatacataccatgtttggtctatttcacataataatatgacttctaattccatgcataatttatacataattttcagtgtgtacatatgacacattatctttatcccttcataagttgacagactccctatgttgacctcataacttggctatgctaattaggctgcaattaacatagaatatgaagatttctccatagtatgttgacttagcttctttaagatgtattcccaggttgtaaaagtagattatatagaagcagtggttttagtttttgaggaaactccatactggtttccatagtggcaatgctaatttacatttcatcctgaagtgtttaaggatttctttttcctacacctttgccagtatttgtcatagtttgttgacattcttactggggtaaaatataatctcaaaagtggttttgatttatgtttccctcatggctaaggaactaaagaccctgtcctgtgcttactaaccacttatatttcaacttttcagagctgcccatttccttgacccatttatagaccaagttgattggagtttgagtgtttgggttccttttgtttcattatttatatattctatatattaatgctgtgttagaaatatacctagtagaggttctctcccactctgtaggtgtttttttttcctaactatttcacaatcagtgcagcttaaaacaaacataacccattttatgaattaaataaattccaagaaatcccaaactataactttcccaaacttgatagtttgtgatttcttggaatttttttaattcataaaatgggttatgttccttttatgctgcactgattgtttagagaccaggtttggtgtcagaattgcttctagttcaaattctgtttgtatgtttaagcacttaacactataactttggccaaaatgtttattttaaatttcaacttccttttctaaaaaaaaaatggatggaaataatagtcatgtaatatgcttcatgtgaatactaggcttcatgtaattattaggaggttcctcaaaaagtaaaactagtgcttccagatagtctagccatacaactcccagaaatgtacctgcaagaagctcagatctacacagtcatggtagatgcatgcataatgggtgtaccagttaccattgctattttttcagtaattcctcatgaaatctcatctatgtgcttacaaccaggagtctgattagtgtgtgtgtgtgtgtgtgtgtgtgtgtgtgtgtgtgtgtgtgtttaatgaggaaagggtgaagtccaagtgcgattagaaagaaggcctgcttctactaggtgtgttcaccttattataaatctctttaactctttttgacatatggccattagttcatcccttctgtgcactcataagcgctgtgcctgttacatgttggctacaaatgaactaatgatcccgtgttacctggcagtgttgctgatgttcttatttataaatttgatattttcaagtagatgggcctttatttgcagatggccagaactctagcaaggatgggaacataaagacaccttcttcacatccttagtcatactgaacagagtccctggggagcaatctttactactttccccctgtccctttcctattgcttcctactgtgatgaacacttttagtggctgtctggctgcctttcttctctttgttcttgtagctgactctgcaggtggatagaagatggtctcaggtgagagcagtttcagtgtcaggcaaagctttctctagcgtttcctcattctcagaccccctcctgccctttcctgacccaaccttgttgtgtacttcagtcacactttccacagcagatttttggagtttaaagctccaagtgggccttgtgtgttcatccgcacttgtattgaccatttctgctgatgctctcttcccacctagacctccggatgaccatttaccagtctctataattcttacatgaggacacatgctgccgttagggacttctgtgtttccttgtcattccagcaggcggtggtggcagggttggtgctttctatgcaccagggttgctcgaggagtctcagcttcccatgctgcactcaaggaagactcccacgctgcgcttctgcggtagcctccaaaggcagcaccgcggctgcccctggctgcgagaaccagagtcttgcctctgcttctttcgtttatttgcctcatcattcctttctcatacttttcagctctccctgtgtgtgtagccggtgctcacctgccctcttccttgtgaacagggcatcttgccttgatttccctaggccatgtggaggcagcttctgatcaaccatctttctcaaaaccagtttatttttctcatgctagtcgtttggtatttgtgtaagagttcagagaaaatggatgttacaacaataacctcccaaaagaatcaatttgatcagtatcagcccaaggctgatggctttcgttatttcagagtggcacaattatgggttcggaccctgcagtggcagttactagtggtctgggcagaggtgaccctatgtgaaggcacacgtgtgaatggtctcaatagaaaatctttctttgtatattacacttggaagacacctagctgaagtagccggcaaaaagttctaccaggggctatgtagatgtcaagtagttttaaattaaaaaacaaaagcatagatcctggcagtgtggctgggtgtctgtatcagagttcacatattaactggaaccagctggtgttatttatttattctaattagacattcatttaatgtcttctgataggttcaacacacacacacaaaagacataaagtctgtcctaaccagaggatttaatttcctaagaaattgtctctcccctcttaaaaatagattacagtccagatggaggggccatcaaagatgccttggaggatgtcaatgactaacaggcagtggctggttttgccctcgagttgtttggctttgaggtttgtcttgtctgggtagctccataacctgaggcaagttatttattttcttcatatcttaatttctttatctgaagatgagataaaagtagcatccgtttcttaacttgggacagactaagagaccagactgtgacacagccagcaccaggctttatggtcacgtagcaagtgctcggagcacatctgttagaagccaccttgaatttttttttaaagtaattcttagccggccgttggtggcgcacgccttttaataccagcactcgggaggcagaggcaggtggatctctgtgagtcctaggccagcctggtctccagagcgactgccaggataggctccaaagctacacagagaaaccctgtctcgaaaaacaaaacacaaacaaacaaaaagtaatactttattgattctttgagaagttcacatcatgcagcccaatgctgctcacctccaagtccctccatatccgccactcatccctgcagcacgccaccaccgcccccccatttattaaaaacaaaatcaccacattgaatttaaattgacagaaataagaaaagaatcaaggggtgcttggtcttacaggtatcacctattagctctcctggagctcttcctgctgcttcccccaaatgaggcaatgaaaagatgaaacagcaaaaatcaagcagcaaaccacagcattacagggtggcgtgagacaacagcagcagaagcggctgaaaagcctgtgttcccacttcagcctttaactgcaaacacaatagagccctgtgggctctcaaaccacctcagggaaggttctagaatcctggtgcatcctcctcctcctcctcctcctcctcctcctcctcctcctcctcctcctcctcctcctcctcctcctccttttttttggtttttcaagacagggtttctctgcatagctttggggcctatcctggcactcgctttggagaccaggctggcctcgaactcacagagatcctcctgcctctgactctgcctcccgagtgctgggattaaaggcgtgctgtgccaccaatgcccggcgtgcattttcttctaatctttctcattttgttgttttctatgccaaaaattaaaaccagtgaaataaaaaaaaaaaagctaaaaactccaaggccaggtagagatgtcctgtgattgcttctatgttctaaaacataaattaaaattctgccccctgagtatataacttgttcaattttagcctggtctgacaatgtatcagcttccaaagatggggaactgtgtctctttctctgattcatagtactatactcattgaatacatagtgagttaataaactaacctccagatactagctataaaaaataaacatgttgaatgaacaccagtataggttatcattaggcagtgatccaagtatcaataatgagccatgtgagtgttccctgaagaactgtgatcattgcaatgtttccccctttaaatgtatattgactgatgagtggaaatagttgaataacatttggggagatcaaatgtattacatttgtttttagtagaaattacattagcttaggaatgggatgaaacacacacccccccaccatgcacaaaaattttccttgcatatattccatttaaaaatgtttcctaagtctggcagtggtggcgaacgtctttaatcccagcactcaggaggcagaggcagatggatctctgtgagttagaagccagtctggtctacagagcgagttccaggacagcctccaaagctacacagagaaaccctgtctcaaaaaaccaaaataagtaaataagtaaataaataaataagtttcatgtaaatagagtgaaaccattgagttaacctaatttggttacagcctttacagattttctttgttttgtaatatttaactttgctttttttttcttatatatgtgatacatttcaatttgttgtgaaaaactcttaaactacaactgctacttctcccaaaatggaataaatatgttctagttgctttttctctgggataattttcttaataaaggagaataccattcaagtcatatgttttactaaactagtaaattactaaattatcattaacacctatcttctctttattctagatgtactgtatacatctaggcgtacatatggtcagaactcctgggaagttctcagtgaacctgagctaagtccatatagccaaccaagatggcacaggcaagaaaaaaacattttgccaataatttaaatttcatctgtgcttaacacaaacaaagtcctacattctgaatttggtcaaagagctggatcattggtttgagggttttgttgttgttttttatttgtttgtttgtttattgtttttagtttggagttttgttttaatttggatttttgtaggtgcattttgtttttgcttattataaattatttcacatagggtaaatttcacatgtgaaaagctgtgaagggcttgtttctttcgttcagcctcccacaagttttaaattctgttagtttgctttctattgctttgataaacactgtaacctaaagcaatttgggaaagaaagagggttgttttttgtttgtttgattgtttttttcttttttcgttttttgtttttcagcatatgctttatcgtctgtcactgggggaagcagggcagggactaaagccaggaatggagaagcaggaactgacgcaaggactgtggaggaacactgctcactggcattcaggaccaccaaaccaggagtggcactggccacatcagtcattaatgaagtaaacgccctacaaacttgcctataggccaggctgacggaagcatgttttcaatcaaagttccccgctgcccagaagcccctggcttgtgtcaaactgacaaaaagctaacctggacatacaaggatgtatatatgacttttctttacttctcagaaagaagccctagtgtttgtttgtacacattgaagggcagtcttgcagagctatttgacatgtgtgcctatgtgtgctattttaagtcac
